United States Patent Application Publication US 2023/0390346 A1 - sequence listing, part 5

SEQ ID NO: 6 - DNA, 1000000 bp, Bacillus amyloliquefaciens
taaaaaaccatacattgaagtgacatacacgattccgaaggcggacacgccgtctgtcaaagcgtatcataacggagattcgacaggactttcaatatcagctggaaaaaagctgaaggcgccaaaagctataaagtgtggctttataacgggaaagaatatcaagccatttctgtcggcaatgcaacctcttggagcacaaaaggaaaaacatctggccgacaaaagcaaaatcgactccggcaaatataagctgcatacagacggaaaaggcggaagtgaattagcgcttaatccttcgccggtctataaaaaactccggcggcagctatccggcaagtaaaaattactgggtcgcggtcagcgcggttgaccagggagaaggcgccatgtctgcggccgccaagcccgtcattccgaatattggagttcagaaaccaagcacgaaaggctttaataacaacaacgccacaggctggtttgatctttcctggaaagccgtatcaggcgcagccgggtataaaatgcaagtctttaacggcaaaaagctttgaaacgcttgacctcggaaataaaacatcctggtccacaaaaaatcaaaacatctggccgacaaaggcggaaatcagcgccggaaaatatgcgcttcacctgaaagacaaaaaagcgcggaattgccgatcaacccgggccccgtttataaaaatgccggcggacgcaaaccggaaaacatacggatttaaagtaatcgcctataacaaagacggagaagcgatcgcctcaccggaagctagtccggcgctgcctgatatcgcaaagccgaaaatctgacaggctacgtctatacgaacacgaaatcgagccaaacgggttatgtcaatctcatatgggataaagtcaaaaacgccaaaggctacaaaatcaacatctacaacggaaaagactatcaatcattcgatgtcgggataccgatcattggacgacccaaaacaaacacatctggccgtcagccgatgaagtgaaagcgggaaaattccagcttcacacggacggaaaggcgcgaactggcgcttgacccttcacctgtttacgaaaacgcaaacggcaattacaaagggaagaaaactattcctttacgctgaccgcctatgacgcaaatggtgacagtataccgacggcaccttttaaccctgtttccatgaaggtgcggaattcctcggaacggaagaattctggtctattatcgacattccggacggacagctgaacggcgcgacgggaaatgtcatcgtcaatgaagaagatattcaatcgacggacgcggccggggctcggactctcccggacctttaacagccttgacagctctgaccatatttcggccaaggctggtatgccgatgcggaaatgtcgattctttctgaagacggcagagccgtttatattgatgaggacgcgacaacacatgtcttcacgaaaaaatctgacggcacgtatcagccgccgacgggtgtttatctcgaactgacagaaacaagcgaccaatttgtattaaaaacaaaggatcagacgaacgcttatttcagcaaaaaaggcggcaagcttcaaaaagtcgttgacggacacaacaacacaaccgtatacgaatataacgacagcaatcagctgaccgccataacagacgcatcagggcgcaagctgacatttacctatgatgaaaacggccatgtcacatctcttacagggccgaaaaacaaaaagatttcgtattcatatgacaaagaccttctcaaaaaggtgacggatactgacggcagcgtcacaagctacgactatgatgccgaagggcgcctcgtcaagcagtattccgcaaacagcacggatgacaaaccgctgttcactgaataccaatacagcgggcaccgcctggccaaagccgttaatgcgaaaaaagaaacgtatgattacagctatgacgccggcaaaaaaacgctgctcatgacgcagccgaacggccgcaaagtgcagtacgctataacgaggcgggcaacccgattcagatgatcgatgatgccgaagggctgaaaatcacgaccaacactgtatacgaaggcaacaacgtcattcaggacaccgatccgaacgacgcggatgcgggcaaagcgacagaaagctatcaatatgataaagacggcaacgtcacagccgtaaaagacaactacggcaccgaaacgtatcagtacaacaaaaacaatgacgtaacgaaaatgaaggataccgaggggaacgtcactgatattgcgtacgacgacttgatgctgtttctgagacggatcaaagcggaaaatcctcatccgccgtgtatgaaatggaaatctcattcaatcaagcaaagagctggcagcttcggcaagcctgctgaaagacggcagctttgaagcaacaaagctgggctggaatctcaccgctacgagagacagcggaagcatcgcgtctgtaaaagcaagaagcggcgcgctgtccggacaaaaagcactggagatcacctcacaatccgcttcagccggaacagagcacggccatgcgtccgcaacgcaggaagtgcagcttgagccgaatacgacgtatacactcagcggccagatcaaaacggatctgacaaaggcgagagcgtatttcaacattgatctgcgtgacaaagaccaaaaacgcattcaatggattcacaatgaatcaggcgcattagccggaaagaatgactggacgaaacggcagattacctttacaacaccggccaatgcaggaaaagccatcgtctatatggaagtggatcataaagacaaggacggcaaaggaaaagcgtggtttgatcaggttcagctggaaaaaggcgaagtctcttcaagctaaacccggttcaaaacagcagtttcacggctaaagcagatggctggagcacaagcggagccgcgctgaccttgatgaaggcttcgatgatgacagctcattaaaagcgtcccgcacaaatgcatcacaagccaatgcggccgcaaaacaaaccgtcacattaggccaaagcgcgacgataagccggtatatatcacgctgacagggatgtccaaggcagacggcgtaaaattaacgaacgacaatgattacgcgcttcaggccggcgtcacctatgcggacggcacgacgggcgtctacaccgccaaattcccgcaggggacacaggaatggaaccgggcggcggcagtcattccgaaaacaaagccgatcaataaaatcgaaatcagcattctgtcaaaaaaagcgccacagaacggcgtgtttgatgacatcccgattaatcgaagaagcatcctacgaaaaacacctatgacgaaaaaggaaactacgtcacaaaagaaagacgaactagttatgcaagcactgcttcatatgacgagactggcaagaaaatgtctgaaaccgacgcgaaaggcgaaacaaccgcctacaatacgatcaggccgaccagctgacaaagcaccctgtcaaacggcacatccatccttcacagctatgacaaggaaggaaatgagctgaccaaaaacgattcgggccggcgcaaaccagacctatcatatgaatatacgtcatggcaagctcgtcaaaacaaccgaccgctcggcaatgtactgaagagtgaatatgacgccaacagcaacctgacgaaaaccgtttccgccaacggcaatgaagtgtcgctgacctatgacggcacgaccgggttaagtcaaaagcgtataacggcactgaaaaatacaactttacctatgacaaaaacggcaatgaaacgtcggtcacaaacaaagaacaaaatacaacgaaaaaacgcactttgacaacaaaaaccgcctgaccgaattaaccgaccgcggcggcagccaaagctggacgtatccggctgattcagataagctgaaaactttctcatggagccacggcggccaaaaaggaacaaacagctttacgtacaacaaacttgatcaaatattgaaatgaaacggcacttcagcctatacatttgattatgatgaaaacggcaatgtccaacattcatcagcggaaatgaagtcggcacgagcttctcatatgatgagcggaatcttgtcagctctcttcatatcggagcgaaaaacggcggcagcatcttccggaaagctatgaatacgacgccaacggcaaccgcacggtcatcgacagctcagccggcgaaaggtgcagtacgaatacggcaagctcaaccagctcgtcaaagaaactcatgaagacggcaccgtcattcaatatacgtacgacggcttcggcaaccggacaaacgtcaccaccacaaaggacggcgcaagcaaatcagtcaacgcatcattcaatatcatgaaccagctgacgaagtgaatgagaagacctgtcctatgataaaaacggcaaccgcatatctgacggcaaatacacatatacgtgggacgcggaagacaacctgaccgccgtcacgaaaaaaggcgaagacaagccgttcgcaacatacaaatacgatgaaaaaggaaacagaatccaaaaaaccgtcaacggaaacgttacgaactacttctatgacggagacagcttgaacgttctgtatgaaacagacgccgacaacaacgtcacaaaatcatatacgtacggtgacagcggccagctgttatcctatacagagaacggcaagaaatatttctatcactacaacgcacacggcgacgtcatcgccatctcagacagcaccggaaaaaccgttgccaaatatcagtacgatgcgtggggaaatccgacaaaaaccgaagcaagcgacgaagtaaaagacaaccgctaccgctacgcaggctaccaatacgacgaagaaaccggcctgtactatctcatggcccgctactacgaaccaagaaacggtgtattcttatcactagacccagacccgggcagcgatggggattctttagatcagaatggatatgcatacggaaacaacaacccggtgatgaatgttgatccagatgggcattgggtgtggctagccattaacgccggctttgcggcttatgacggatataaggcatataaatcaggtaaaggatggagaggtgcagcctgggcagcggcttcgaactttggtcctgggaagttatttaagggtgctaatcggatttataaagctgctaaaacatataaactatctagaaaaagtgtacggctagaagggcctactcaagttatagggatataactggaaaaacttctagttcaaaaattattctactaatgtaaaaagaagaactttgaaaaaatttaagaagacaaggatggagaaaatcagttcatcatgggggtgttatcactatgacgaaaaatggaataagtattccctaaggaaacatgctaagtcaagtccctatccaaccgcggaatatacacctaaaggtagaaaaaaattcacacacaaaatcagaatgcgacattaaaggggaaataagatggatcactatttattgatcatcctaaggagttaaaagtctatcaatccataattaattccttatgtcacgtagatcaaacattgcctaaacaagtttttaagcaaaggaaaaattattatttatcgaggaattccattgggtatatctgaagaaagttggggaatgtttaagagtttggctaatgaacatcatgatgagtttatattaatggctgttatagacagttctgaacatataaaccaattctacgaagaatttgagtattttaactggataaagatccctttgcatataactgcagatgagtatctgtcactcttaactgattatccaaagcacagtaaaagtgactgtataatgaatattgcatctcgtgtgtttgggcttcaccgactttaaagtgggcgatttatggtgaagagaacttgaaatctgtattctaggtattgatcatcagagtgaaggaaaagaactagcaacttggagatcgttagatggcgttgtcttagattggatatcagttgtattcccaaatcagacggttccagttgaatttgaaaaacacttacggcacattacaaataagtatattttaatacctactaccgatatcatctgattgttctaaacgggatttcaaataatctccagatagtatttttgcattcaacagatatttaatgacaaatatgcagagtaatatattttggggcttgtttgaataatctatgtttatcatcaagacacttctatcaatgggtttgttagtgttagttaggagaaggagaagacaatgcacaaacaaattgaacaatagagtagattatattgacgagggatgtaatattttaaaggtcgattatcagttctttaaaaaagacctgttttaaggttcaggttgttaaaaatgcagcatctgttatttagtgcagatattggtgatatgagattagaaaaaatagattcggaagaatacaattggcaagtatttgagatgagttaccacccggaaggaatcggtaatctatcaaatgctgtaattccggagtatcaatcaaatgctaattttctcattgacatgaacagaatgctgattgctgtagaagctgaaacagttcgctttgacgaccaatcattttatgcgtatcatccgaaatcataaataaacaaataagagaggttcccagcctctcttttcttacataacgaaatcgttcgcggaggcaaacatgaacactcctttaaatttacaaaaagaatcattgagggctatagggaatctggatgtgattaatccgcttaaatacaattcgatttattcatgtgatctagtgagtaaagatactttttctcaaattaatgaatgacttagagttcgaaacagctctaatagaagtaatggcattcccttcttttattgaagaatggaagaagaaggttgaaaagaaaatgataaatatgaatactgtatcgaaaaagttcattcatattgaatgtgtcctaaccaaagaagaattgatggcagattacttattagatgaattatattttttagcatcgatcaatgattttgttgttataatagcaaaccctgccaaaaataagtcctgcatgaacctgaacactcaaaaggttgatgtaactactgaaagtaatgaaaaaatcatttggtttgaatacgatgcagcagatttatatatcattgattaatttaatataaatttcaggttcctattcaacggagtgttgctgatgttaaaacttaccgcggagcgtgttgggtcatatgaaagggaaaatatcatttatttcaatgcgggtcgggatgatcaagtatttattgtgtcggtgcacgatcacaaagtaatattggaggttatgaaaggcagctctcttttaatcaaaaaagagttacacggattttctgaagatgcccatttctatctgattgattcgtatgatgacactatcgtgatcgtttacctggagaatcatacgtgtcaattggctgcatactgcgtaaacagtaataaaatcaatccgatttgttcttttctattaagcgccaatgtatttcatctgggtgaggatggattattatggatcggattaacggacgagggtatgtatgatgagagaaatcctcaaggaaaagcgatatttgcttttcatgcagaagacagaacgttttattttgaagacgattttaaagaaatgatgcacgaatgctatgccgtacaatcgatcaaatctgatttgtatgtatgtttcgagggagaggattgctgtgtcatcgggcattatcagattggacggacagaattcgtactgttgcagaatatgtgctggacggcgatcaatactcctattgtgatcagctatccgttcgaaaaaaagggtgctgctgattcagagtcacgatgataccctatttgcatttcatgaagagcacaaagagactgacgtcatgatacacggtattgatagaaaaggagaaacaacgtacagagccgtacaggatcgcatgtttatctttagtgataacgatttatatctggtaaagtattgatcaatcctatgcagatggctttttacagccatctgcatatcattttacggagtgaacgatcgatataaataggataccatccaagactcaaggggcaatgacatgaaaataaaaatgaataagatagtcgaagaatcagtaaaaggatgtttttgtcattttgataactgcgggcgtctgtatctcggacggcatcagaatggcgggctttcgtttacgatcatcgacaaatcgggcgatacgcgagtgattcatatcgatgaacaaatcccgtatgaggatattatgctgttccaacagagttcggctgactggtatgtgttgattttctttgaatcgcatgagtataaagtgaaagtattttcagcagaaggaacagaacaaagtgcattttctctcccttcaggggtttcatgcagtcttttggatgaaaaacaaaacctgtggatcggtttaagtgatgaaggtatttatagtgatgaaaatcctgaagggcacagtgtgctgtgcttcactttagacgggcagctaaagaaaacccacattgatcagcagctttcagaaatatatgcgcccgcggtagatgactgttatgcacttgcagaaaaagacggactaatctacatgctgtattacgcttatacagtcattgctgcgtttgaagaaaccgacgtgaaacgagtgtggattatttctgataaagcatattccggggtttacgaccagctagcgatttcagataacgggttttgggtatgcaaagatgatcattcactgtctctcattccggccgatgtcagtctgccgatgcaagagataacgtgctgtgatgcggatggcgatgagctttccgggcatcagctgaagctgactggcgatgccatttacgcggtctcgaattcagggatttataagcgggatatcagtaatgggaaagcggctaaatgagatgttaagatccaacagatattctttaaataatgacgtcatcagaagcttgaaattacacaaaaagaattagaggggccgctgccttcagatgcagggagattcgaagaagactttgagggtgctgcctgcgctggggatttttatgaatacttcgcacttgtctgcggcagcttagattttgttttggcgaataaacaaatgcctgcacggcagcgtaaagccttatataaatccttttttgagctgtatccgcaatatgcgcagctgaaaaacgctttgatggattatccggagctcagccaggaaatcgggcggcacgaacgggccaggaggctgttagtcagcattttaaacaagaaatgaaaggcaggattttgacgtgaaagaacccacaagagcagaatgtctgaaaaaggctggtctgatcctgaacggtcaagcggcgagggaagaagtgtcggattgggcgtctgagtatgtgagtgcaggtgatccggcggatgaggacgaaaccgtttgggagatgctcgtatatttgagcgggtttgatctgaaagattcgcctgatgcgtatctgcatacgatagaagaattaagagattgggtgcaggaatataaagaagttcatggggatttgtaagaaaaaaattcatttgagtcagacatgtcaattcagctgaaaaaaaggaggcgcaaaatggaatggcacaaacatgagaaagcagttctgccggggccaggttcgccgggttgttttgaattgacggagtttacgttctataccgggtataacgagtattatgataaaatcccggtgtttgagctgaagctgactgacggacagtatgatgccgtgctgcggtttgaggatgtgaggtctgcccggctggatgatcttgaaagcatcaccgacatccatctggatatcagcccagtcgacggcggctgggaatcgatccgctactatgtcgatgacggggaaggaagtatgagcttttattgcgccaaatgggtcgtgctcgacatgaagaaaaagcagtcccccgaacggcccggcaaaacgtcagggtaaagcggcggcatttcgcgtataatgaggggagccggacagagaaggagtttagtcatgaatgagtttaatgaatatgcgatcagccccgagatccgacgggcgctgaatggcttgcaatacaccgagccgactgaagtgcagcggcgcgtcatccccgccgcgctgcaaaaaaaagacctcgtcgtcaaatcgcagacgggcagcggcaaaaccgcggctttcggcattccgatctgcgagcttgcggagtgggaggaaaacaaaccgcaggccctgattttaacgccgacccgcgagcttgcggcgcagattaaagaagatatcacgaatatcggccgtttcaaacggataaaagccacggcggttttcggaaaagcttcttttgacaaacagaaaaccgaactgaagcaaaaaagccacgtcgttgccggaacgccgggacgtgtgcttgatcacatagaaaaagggacgctgccgcttgaacggctggcgtatgtggtgattgacgaagcggatgaaatgctgaatatgggatttattgaacaggtggaagccatcattcagcatctgccgaaaaacagagtcaccatgttgttttcagcgacgctgccggatgacgtcgagaagctgagccgcacatatatgaaagaccctgaattgattgaagtaaaagcggaaggcctgacgacaaaagacattgagcattttgtcaccagaacagaagaagaggataaatcatctttgctgcgtgatgtcctgatcaccgaaaacccggacagctgcatcatattctgccggacaaaagaaagggtcatccagttaaccgatgagctggacaggctgggctacccttgtgataaaattcacggcggcatggtgcaggaagaccgctttgacgtcatgaatgaattcaagcgcggcgagttccgctatctcattgcgaccgacgttgccgccagaggaattgatatcgaaaacatcagcctcgtcatcaattatgatattccgcttgaaaaagaaagctatgtgcaccgcacaggcagaacgggccgcgccggacaccgcggacgggccgttacgtttgtgacgccggctgaatcgcggtttctgaatgacattgagacatatatcggtttccgcatccaaaagcgggaggcgccgtccgagaaagaaacagcggaacggaaagcggcttttgcggaaaaattgaacgcccgccccgatgtcaaaacagacaaaagcgaacagttaaacaaagacatcatgaaactgtactttaacggcgggaaaaagaagaaactcagagcggtcgattttgtcgggacgatcgcgaaaatcgacggcgtttcagccgatgatatcgggattatcacgattctggacaacgcaacatacgtcgaaattctgaacggaaaaggcccgcacgttcttgacatcatgaaaaatacgacggtcaaaggcaaaaaactgaaagtccataaagccaagaaataaaatagaaagcctgccgcgtgcaggctttttttacgccgtttcctcaggcacaaacgcaaggatggcaatgccgatcacaaataacaaaatcaggctgaacacggcggctgacgaatttccggtcagctgggcggtgacggcaatcaaaagcgggccgataatcgaagcgaacttgccgaagatattataaaatccgaaaaactcattggcgttctgtttggggacaagctttgcaaagtaagagcggctcagcgcctgaatacctccttgggaagtggcgacaagcatagccaaaacccagaaatcaaaagcggaatccataaaataagcatacgtgcagacaatcatatacacgccgattccggcataaagcattgtttttcctttaaaccgttcggccagccgctcgtacaaaatcgaaaaaggggcggcgacgacctgtgtgacaaataaaacaatcagcagatttgccgcgctgatgccgaggtcagccccgtatgacgtggacattgtaatgatggtgccgaccccgtcgatatagaagaaataggcgagcagaaacaaaaacagcgcccggtgcttcctgatctgcttcagcgtgccggccagccgtataaaactgctgatcacaagccgcggctccctctcgatataatagcgctggcggacgcggagaaggagcggaatcgaaaacagtccccaccatgccgccgtaattaaaaaggcaatgcggcccgcagtctgggcggacagcggaatcacctccgcttgtgctgacagaatcacggcaatgctcaggagaaaagggattgtactgccgatatagcccagcccaaacccctggcggacaccatattcatccgctcctttgcggccacatcaacgagaaacgcatcataaaacacattagatccggcaaagccgatcgtggaaatcgtataacaaattaataacagcatccaagattcgccgggaatcaaagccagcgcggcggtgcccgccacaccgatcagaaaaaagaaggcaaaaaaccgtttcttgcatcctttgtagtcggcaatcgttcctaagacggggctgagcatcgccaaaataaaagtcgcggcggcaatcgtatagcccaaataagcggtggaatcagctgcgctgacgccgttttccgccgccgccgctttaaaaaacaaggggaacaccgccgtcataataatgaccgaataagctgaattggcccaatcatacagcatccagctgctttcttctttcgaaaaccgtttcatcacacacgctccttcccaaaaaccggttctctgcattatatgcgcctctgcctcatcgttggacaatgatttctgaacggcgttttctgattgacctggagatattgacctggtacaaaaaggatgtacaatcaaggtgtagcaggtaaatggtcaggcgggagggagacggaattgaagattgcgaaagtcaataataataatgtcgtcagtgtgctcaaagaaggcaatcaggaattggtcatcatgggccggggcattgcttttcaaaagaaaacgggagatccggcagatgaagcccgcattgagaaagtgctcaccctcgataacaaagatgtatccgaagttcaaaacccttttgtatgatattccgatcgagtgtatgaaagtatccgaggagattatcagctatgcgaaattacagcttggcaaaaagctcaacgacagcatctatgtgtcgctgaccgaccatattactttgccattcagcgcaataagaaagggctggatatcaaaacgccttgctgtgggaaacgaagcggctctacaaagacgaatttgcaatcggaaaagaatcgctgatcatggtaaaaaacaagactggcgtgtctctgccggaggatgaagcaggttttattgcgctgcatattgtaaatgccgagctgaatgaggagatgcccaatatcatcagcattacaaaagtcatgcaagagattttgagtatcgtaaaataccattttaagattgaattcaacgaagaatcgcttcactattatcggtttgtcacccacttaaagtttttcgcgcagcgtctttttaacggcacacatcgactttttgctggagaaaaataccgtcgggcgtatgaatgcacgaagaaaatccaaacttgcattgagagggcgtatgagcacaagctcaccagtgacgagctgctgtatttaacgattcacatagaaagggtagtcaaacaagcataatgaaagcgttggcattattgttcttggattcattttttcttacattcacatatgatcttgttaggattgttgctgataagcatgcaaaacctaaattacaatgagcgcggatcatttctgtttgtgctgatggtaatttaggtttttttaagattcgttattatcattattctgaccgatgttcccttttaacagaatcatgtatgatcgataaagaaatcgctctcaaagaaaggggaatgccgacatgttttatcgtatgaaacgagtgctgctcattcttgtcactggattgtttttgagtttgtgtgcgatcacttctgctgcatcagctcaaacaggcggatcgttttttgaaccttttaacagctataactccggtttctggcaaaaagcaaatggttactccaatggagatatgttcaactgcacttggcgtgcaaataatgtatccgtgacgtcatcaggtgaaatgcgtttggcgctgacaagcccgtcttataacaagtttgactgcggggagaaccgctccgctcaaacctatggctatggactttatgaagtcagaatgaaaccggctaaaaacacggggatcgtttcatcgttcttcacttatacaggtccaacggatggtaccccttgggatgagattgatatcgaatttttaggaaaagacacgacaaaggttcaatttaattattatacaaatggcgcgggaaaccatgagaaggttgcggatctcggatttgacgcggccaatgcctatcatacgtatgcgttcgattggcagccgaactctataaaatggtatgtcgatgggcaattaaaacatactgcgacaagccaaatcccgacaacaccgggaaagatcatgatgaacttgtggaatgggataggtgtcgatgactggctcggttcctacaatggtgtaaatccgctatacgctcattatgactgggtgcgctatacaaaaaaataatgtacagaaaaggatttccgccagcggaaatccttttttaattaaaacgaaataatcccaatcaaaagcgccgcaatcgtcatcacaatcgttgttcccacggcccatttaatagtgaatttttgatggtcgccaaagctgacgcctgccattccgaccaatagataggtggatggcacaagcgggctgagcagatgcaccggctgtcccagcaaggaggctcttccgatttcagcggcgtctattccgtaagcggaagcggcttcggcgatgatgggaagaacaccgaagtaaaaggcgtcattcgacatgaaaaaggtgaaaggcatgctggcaatcgccgtgatcaacggcagatgcggacccatggcatcagggatgagggaaacgagagaatgcgccatcgcatcgaccatttttgtgcctgagagaatgcctgtaaatatgcctgccgcaaacaccattgagacaacgtttaacgcattacccgcatgcgccgaaatccgtttctgctgctctttgacatttggatagttaatcatcaaggcgatggcgaacgcgatcataaaaagaacagggatgggaagcaggctggtgatcagcgcggccatcagagcgacagtcagcagcaggttaaaccactggagagcgggacgcttcagcggcgccgcctccggatcagaagacggcgcgtgttcaatcgaaatgatgccgagacgcttccgttctttttttccaaggagataagcaacggcgatcacccagagaacgccggcgatcatagcgggaatcagcggcgtaaaaacttctgacgtgtccaatttcaaggaagccaaaaccctcgccgtcggtccgccccacggaataatattcatgacgcccgaaccgagcatcgcaatccccgccagcaccaaacggttcatgccgagccgtttgtaaaggggcagcattgccgcaatcgtaatcatatacgttgttgtcccatctccgtccagcgaaatggtcatcgtcagaaccgctgtgcctacggcgatttttaacgggtctcctttgacaaacgataagattttggcaatgagaggatcaaacaggcctgagtcgatcataatgccgaaatacaggatggcgaataacagcataatcccggtaggagcgaggtctgtaacaccctgaatcatcatcccgccgagatctttgccaaatccgctgatcagggcaaacacaacaggaacgacaatcaaagcaataagtgcggaaagccggttagacataataaggtacataaaaacaatcatcatcacaaaaccgagtatggcaagcatgatatgacctcccctgttcaacagctgttttggtaagcgctttcacattttgtttctgtgaaaatggcttatttcaaaatgtgtatgaccgcatatgtaaatacagacctaaaatcctaatgagcggatcagcagtttatttaaagaacgccgcgggtaaatgtgctgtagaatgtttcgttttaaaaggggaactgacatgagtgatgatcaaaacaaacgagtaaatgaacactcaaaggacgaacagctggagcagtaccgatctgataacagcggcaaaaaaatgacgaccaatcaggggcttcgcgtgtctgaggatgagcattccttaaaagcgggcgtccgcggccccacgctgatggaggattttcattttcgtgaaaaaatgacgcactttgaccacgagcggattccggaacgggttgttcatgcacgcgggtacggcgttcatgggcattttcaggtgtacgaaccgatgacggaatatacacgggcgaaatttttgcaggacccgtccgtcaaaacacctgttttcgtccgtttctcaacagtggcgggctccaaggggtcagctgacaccgtccgtgacgccaggggatttgcgacgaagttttatactgaagaagggaactatgacctcgtcggaaacaatattccggtgttcttcattcaggacgcgatcaaattcccggatctcgttcacgccataaaaccggaaccgcacaatgaaatgccgcaggctgcgacggctcatgatacgttctgggattttgtcgcaaacaatcctgaatccgcgcacatggtcatgtggacgatgtctgaccgcggcatccctcgaagctatcggatgatggagggcttcggcgtgcatacgttccgtttcgtcaacgagaaaggaaaagcgcgctttgttaaattccactggaaacccgtgctcggcgttcattccctcgtatgggatgaagcgcagaaaattgccgggaaagatcccgatttcaaccgccgcgacctatgggaaacgattgaaaacggcggcaaagtcgagtatgagctcggtgttcagatgattgacgaagaagatgaatttaaatttgatttcgatatccttgatccgacgaagctgtggccggaggagttggttcccgtcaagctgatcggaaaaatgaccctcgaccgcaatcaggacaatgtctttgcggaaacggaacaggtcgcctttcacccgggaaatgtcgtgccgggcattgatttcaccaatgatccgcttcttcaaggccggcttttctcttatacagatacacagctcatccgtcttggcgggccgaattttcacgagattccgatcaatcggccggtctgcccgttccataacaaccaatacgacggctaccaccggatgacgattaataagggccctgtcgcctatcataaaaattccctgcagaacaatgatccgtcgccggcctcagaagaagaaggcggatacgttcattaccaggaaaaagtagaaggcagaaaaatccgccagcgcagtgagagcttcaatgactatttttctcaggccaagatgttctggaacagcatgtctcccgccgagaaagaacatatcatctccgcgttctgttttgaagtcggaaaagtgaacagcaaggatgtgcagcagcaggtggttgatgtcttcagtcacgtcgacgccgggcttgccgagcgtgttgcgaaaggaatcggcgtgaacccgccgccgaaggaccgtgaatctgatgaaacgttcacttccccggccttaagccaggaaaacacggtgaagacggcagcgacaaggcaggttgcggttttaaccgaccacgggttttctgatgagaaagtcaaacaagtgcttgacgcatgcaaacaggcgggagtcagagccgatatcatcagtcctgtgcttggaaccgttaagggagaaaacggcacggagctcgaagcgtcagccacgttcctgacagcggattccgtcctgtacgacgctgttttcattccgggcggaaaacaaagcacagacagcctcaaagcccaaaaatcggccagagacttcgtcaacgaagctttcagccattacaaagcgatcggcgcctccggtgaaggaaaagaacttctcgccctcgccgccggaaccgaaagcggccccggtcttgttccggacggaaaccatgaacaatttctgaaagccgtggctgagcatcggcattgggacagaaacgtataagaatgaaaaagcgcctttgatgagaggggcgcttttttcttgtgaaagaatattgggagaaaacgaaaattgcttccgtacaaatccgtatcttccgctgtcctggacattcagacaacagttttagagagtcagggcatgcgctatttaaagcaggcgggttgatgaaataatagtttcaccctctttggtttacttccgccctgtgtttgtgtatcttaggggtagattttctggaggagcgattgatagtgaagccgtttaccgaaaaacaacttgaagaatattaccggcgtgacgaaaacatgatgattttggtgtttgcccaatggtgcgtcaatcatgaccttgatccgatggccatttacagcaaagcttaccccggacagcctttaaacgaagagctgcgaaaaacggctgaagagcttgtcgtgccgaaggaggaatcagaaccgattcctgatcaaaccgtcatcggcgttttggagatgttcggcaactccgatttggcggaagccgtttatgaagccattgcgcaaagaccttcacggtaaaagaggcgtggattatccatgtctctttttttcatggagaaaatgtgaaagaaggcccagaaacaatttgctgatctgcgctgtctatagagtgtaatccgttttcaaaaagggaacggtaatgaaaaggaggagttgtgatgaaaaaggcattcaaaatgatggcggccgtgctcttaaccgtgctgacagccgcgccgttcggaggtttcgcgccttcagccgaggccgcgcaaactgcaaagcccgtcgtcaaaagccagacgtataagcatgtaaagcagctgacgtaccccgaggtcacaaatacgggaaacgcatcttttgaaaagaaaatcaatcaggacttcaaacgctatattgaaaactcgtaccaagaatatgtaaaaaacaaaaaagacggtgaaaaacaaggctacaaagcggaataccaggcagatttcaaggtgaagtataatcaaggcggcaagctcagcattcagacggaaaactacagttacacaggcggcgcacacgggctgacagccgttcagacctttaattacgacctggccgcaaaaaaacgggtcacactcaatgatgtgctcaatacaaaaacgaaagccaacaaaacgagagactatctttacggctacatcaagaaacatgacgatctgtttgaccaggacgtcaaaaaacaagagatcatcctgaataacgaaagacctttcttctttacgaaaaacggcattgccgttgtgtttggacaatatgatctcggaccatacgcggcaggaatccgggacgttttcgtgcctgcatccgtctatcaataaaaaaaagcgatatcactctaaaacggagcggtatcgctttttttattttaccagacaaacaatccgacaatcgccgcgctcaataaggaaacggcaattccgctgacaagcagcttccagacgttttttccgatgatggctgacttttcaccatcaagcagagattgataagatccgtagatcataccgatggtgctgaagtttgcgaatgatgtcaggaatgtcgtagccacggcaatcgtgtgcggcggaagtgatttcagctgccctttcagatcggccattgccacaaattcattcgtcgcgagcttgatgcccatcagctgtgcgacatacatcgcgtcatgtacgcctaatccgagaaggaaggcaaacggactgaagatgtatgagaaaatcttttgaatggtcaaaccgtgcatgaacagtccgagtacgccgtttaacgcagccgttaacgccacatatccgattaccatcgctaaaataacaatgaccatgttcatgccgacaagcatactgttagaaatcgtggagaagaagtcttttttctccgcttttgaaggaacgtaaataatatcatcctctttagaaacgtccacgggattcagcatattggcgattaaaagcgcgtttaagcaattcagcgggatagctgtaaacacataagtggacggaaccatcgtcaagtacgatccgatgatcgaaccgctgatgctgctcatgctcatcagcccgaatgtcagaagccgattgttgctgacggcggcaagctgctggcggatgacggctaaagcttccgtatttcctaaaaacatcatctggatggagaaaaagctctccagcttcggcagacgggatattttagaaatcagccagccgattttatcaatgagccacggcagaataccgaaatacgacagcatatcaaagaaggtcacgacgaagataatcggcagcaatgcgctgaagaaaaaatcaaccgtcggattggccatgatagacggaaaagcgaacgcaattccttgactggcgcaggaaatcagccatgtaaagaacgcgccgatcttcccgatgacaaagccgccgacttttgtccctaacataaaccaagtaatcagaaactcaaagacgaggagcatgacaatcggacgccatttaatcttcttcttgttgggagaacataagaaaacaacagccatgacaacaatgagaccgacaatgttcaataaaaagtacatgtgagcaactcctataagggtattatggaaataaaaaaagctcttattcgtcacaaattcctgaaagccagaaagtgtgataaataagagccaaaagaaaagaatagactgagagcatcatatgcttttcactcgttcaaatttatgcaaactttcttgtagtctagtcttttacggcactaggtagaaacaatcagaccatattactgatcatatacaagaataacgatattacatgagatagcagtattttatcgtttcaatttttgaaaatcaacctttttagatattttcaaaataataaatttatattataaataaagaaaataaaggatgttcacaagtaattggattaaaaaggtataaaaagcccccgaaaaacagttccggttcattgtaaagacgggatgcagctgataaaatggatctgagggcaccgccttcaaaagacggcagaaaaggggtcattttcatgatcattcagttcattcgttacagataatgagaggtatagataaataggttaaacttccaattttgcgaggtttatttgtctatgcctttttcatttcatcggaataacgaatgaatgaggtgtttttattgacgtctataaaaagaaaacgcgcggaattactgcaatcatgccagtccgtattcaggtgtccgctatgcagttcggccatggcggtctcacaatacaaaagcttgatgtgcggacacgggcatacatttgatatatcaaagcaaggatatgtgaatttcctcaataaatcggtcaaaacccgctatgacaggcagctgttcgaagcgagacgcgctctttttgacagccgggaattttttgggccggttcaaaaggagatcgccgccatcatcagccgcattcaatctccgcaaacaacggcggcgatattggatgcgggatgcggagaaggcactcatttagccgccgtatgcaaattgcttcagcccgctttttccgtgacgggaatcggcattgatctctcgaaagaaggtgtgctgcatgccgcaaaggccttcggggatcatttggtttttgccgtcgctgatgtggcggatgcgccgtttgccgacagctgttttgatgtcgtgatgtctgttttatcaccttggaattacaaggaatgcagcaggcttttacgaaagggcggcacagtcattaaagcggtgccgcggcgtgattatttgaaggaagtaagggaattcttcttcggagacagtcctcggcggaatgacaccgccgattctgcggccggacgattccaagcgggctttcaaacctttgagcgcaaacggctgtgttacacgaagaccttatcgcagcctgaccttgagcggcttgtgaaaatgacgcccttaacatggaaatgtactgatgaaagcatccggcggtttatcagccgaaaagcggcggatattacgatagatatcgatattttaatcggaaccggtcctctgtaaacagaaaagacacgctgatcgcgtgtcttttttttatttccagacttcaccggcaatgttgacgacatgacgcagtttcgcccattgctgttcttctgtgatcaggtttccttcctcagtggaggcgaatccgcattgcgggctgaggcaaagctgatccaggctgacatattgtgaagcttcttcaatccggcgtttaatcgcgtccttgtcttcaagttcgccatgttttgatgtaatcaatccaagcacaagctgaagatcagagcgtttgacatagcggagcggttcaaagccgccggagcgggaatcatcatattccaggaacaatccgtcaaggtcaagcccgtcaaaaatcgtttcagccgctgcatcatagccgccttcagccgtccatgtggattggaagttgccgcggcagatatgcatcgtaaccttcagatcgtcagggcggtccttgatcgcgtcattaatggaagcggcaaacagcttgcgcagctcatccggcgttgtgccgaaatcttcaatctgacgaagccccgcttcagataagaaaacggcccatgcggtgtcatcaagctgaaggtagcggcacccggcgtcatagaaagcctgaatcgcttttttatacgcttttgacacatcgtgctgaaattgtttgtaatcattctggtaggccgctttttccaattttccgcggaaaaacagcatattcggacttgggatggtcattttcggaacagcatcgccggcaatgctgtgcaggaatttataatcttcgagcatcggatgctgagaaaaatcaatatctcccgttactttaatgccgcgcgctttcgtctgtacgttgtgaaactgaatgccgctttcaggcgtaaatgcctcaaccccgtctaaattttcgagaaaatcaaaatgccaccaggcacggcggaattcgccgtcagtcacgacattgaggccggtttctttctgcttttccacgctgcggatgatttctctgttttcgatttcgcgcagctgttctgccgaaatctcacccgccgctctttgcaggcgggcttgcttcacagccgccggccgcagcagacttccgacctgatccgcgcgaaacggcgggttttttcttagaagagtatgcaatggttgttctgtgttttgctgtgacatgaacgattccttctttcctgatgaaatgaaatataaaaaaactcttccctcggatagggaagagcttgcgtccgcaaatctcaaccttatcttcaggatttagcaccattctgctgaacagcggttgccgggtatcatagggccagtccctccacctctcttgataaggaaatatgctatttttcagaataaactgtaatactcttaatcttagtatgttttctcatattgtcaatatatttcgataaatatttttatttgtcaccctcaaatagaatcatatctatcacgatggcgatcgcaagacaaagagcaatatcctcttccttttcaatctgcaaatgataggaatcgccccagctcatccatgatttggtgacggtcatccggtttgattttccgtctgtcacttgaaaattccggccccacacatcgccggtaagattccagccgagtccggaaatttcaaatttcggtttgaaaaacgtgactttcttgatgacttggcagacgggtttgccgctgacggaaatctcgtaacggggaacgagcgacatcagtttctgattgacgctggcgagcgtgcggccgtccaaatcagtcagcttcagttcatcaccgaatgaaaacagctttccttcaacattgtagacttcttttccgctttcaagaaacacttgaaaacgattcttaaacgtaaacattcgctctttgatgtaaaaatggtacataaaaaaactccttttttatgttttacgaaaaaaggaggcggaaggtttcatatcggccgggtgcataaaaaaaggctgccgattttgcggcagctgtcgtttttatgatagcggcatccggcgtttttgacggatcgcatttaaatcaatgatgttattcgtgtcggcagctgtcaccagcgggcttgtctttggcgttttccggcggttgtccttactgaaagagaaaacaagataccctgtcaaagcagcgaaaataagtagcatcattttacatacctcccaaaaaaagttttggtattattattgtacgaaaaaacaaacgaaaagtattcaaacaattgtcacttttttaaaaaataacgtcattttccgtaaaaataactatgggttgaagaaattttgctcttgttgtggttctatagattgtatcggctgatgaatgatgatcgtttatataactttattactattttttgtaagtgtctaattaactacttcggtgttttcgtttgccttgtgttattcagtaccctaaaaaaccttatgatatgcaaaataactgcttctaacagatgactgcgagttgacagcgctttctttatttttttaaagaaaacgagatgttatcttaaaaaaatcgtttgaacattttccgcagttttttaaaagggtttgattttgtctccagtacacgcgggtcttttaaggtttttttcaattctttcgctacagtccctcttgccatagtcttcactccttctttccatttcataccttatatacggaaagaaagaaggaaaggtttcatgtgaaagaaaaaaaccaaagcagggggctttggttttaagcgcgctcttcaaagagcctggcgatttcaacaatgacgtttaccgccttttccatatgatcgacggaaatgtattcatattttccgtggaagttttggccgcccgtgaaaatgttcggtgtcggcagtcccatgtaagagagctgtgagccgtcggttccgccccggatcggttcgataatcggttcgatgtcgaggtttttcatggcttgatacgcgacatcgactatctctttgaccggttcgattttttctctcatgttgtaatattgatcacgcagttcaagcttgatgctttccttgccgtatttggccgccagcgcatcggcggttttctgcatatattcttttcgttctgcgaagcggtctctgtcaaaatctctgatgatgtacgacagggcggcttcagaaacgtctccgtccatggaaagtaaatgatagaagccttcatacccttccgtatattccggcgcttcttctttcggcagcgcgtgatgaaattccatcgcgatttttgaagcgttgaccattttgtttttcgccgttcccgggtggacgctttttccgtaacaagtaagctttgcggcggctgcgttaaagctttcatattgcagttcgccgagggggcctccgtctatcgtgtaggcgaacgcggcgttgaagcggccgacatcgaatttgtgagggcctctgccgatttcttcatcaggcgtgaacgcgacccggatcgttccgtgcttgatgtccggatgtttgatcaagtacgccattgccgtcatgatttcggcaatgcccgctttgttgtcggctccgagcagcgtcgtgccgtctgttgtaatcagcgtctggcctttatagcgggaaagttccgggaattgctcaggcgacaggacgacattgagtttgtcattcagaacgatatcatgcccgtcgtagctttcaataatctgaggattcacattttttccggtaaaatcggtcgcggtatccacgtgagccagaaaaccgacagtcggcacgtctttatccgtattcgccggcagagtcgccatgacgtacccgttgtcatcgactgtaatttctgtcatgccgatcgactttaattcatctgccagcatgttggccaatgtcagctggccgggggttgaagggcagttttcattgttttcgtcagactgtgtatcgacttttacgtaagaggtaaagcgttcaatgatttcatttttcataccgtcatctcctttgtcttatcttaccatgcgcgggggagggatttctatttcacaacccgtttgaatcgagggctctgttttttacgcgaatgaaaataaattatgaagaaacgatgactaaacgattaaactttttggaaatggatgattgaggaagaaaaaaccgatataatatggtcaattcattcaataggggaggctttcttcatggcgattttagtgacaggcggagcgggttatatcggaagccacacatgtgtcgagctgttaaacggcggctatgacatcgtggttctggataatctgtcaaacagttcaccggaagcattggagcgtgtgaaagacattaccggaaaagggcttgtgttttatgaagcggatctccttgaccgtgccgccgttcaccgggtgtttgctgaaaatgagattgaagccgtcattcattttgcgggattaaaagccgtcggtgagtctgtggctgttccgctccgttattatcataataatctgacgggaacgtttattttatgtgaagccatgcaggcacacggtgtgaaaaaaatcgtcttcagttcttcagcgacggtttacggcgttccggaaacaacgccgatcactgaggattttcctttaagcgccaccaatccttacgggcagacaaagctgatgctggaacagattttacgcgatctgcataatgcggactctgaatggagcattgcgctgctccgctactttaatccgttcggcgcgcacccgagcggccggatcggagaagacccgaacggcatcccgaataatttaatgccgtacgtcgcacaagtcgctgtgggcaagcttgagcgattgcaggtgttcggcaatgattatccgacaaaggacggcaccggcgtgcgggattacatccatgtcgttgaccttgccgagggccatgtcaaagcgctcgaaaaggtgctgaacacaacgggcgccgacgcctataatctcggcacaggaagaggctacagcgttctggagatggtcaaggcgtttgaaaaagtatcaggaaaagaagtgccgtaccgttttgccgaccggcgcccgggagacatcgccgcatgcttcgcagacccggcaaaagcgaaggctgaattaggctgggaagcaaagcgcgggcttgaagaaatgtgcgccgactcttggaagtggcagtcctccaatgtgaacgggtaccaaaaggtgtaaaaagaaagagaccttcaaatgatgagggtctcttttgttatgatgattatttaattttcacttcaacatcgttgctgaactttaatttccaagtgcctttagagtatgcgtttttatccacttcaaaagcttttacgtcagtcactttaatgttcgggttcaagtcacttaaaattttactgttgtctacttttgtttctgttgcatagcttgaagaagcatcaatatctgaatcataagatgttcctttagaatctactaatttcgctcttggaatggagaaagagcttaacggcttgtttgaaacatttttaaccgtgtattgaacagctacgataacgccgccgtcagacgcttttttctcgacaaattgagagcctactgaatctcttttttccactttcgtaacagtaacttcagttttctcagtcttaacagtgtcaccgatgttatacagtttttctttagattccgcagcttttgaagacgcagttttagatgacgaagaaccgcctccgccgccgatgtttacgagaatgataataaccaccactgccagaagcaatgtgatgattttatgtctcatgaaaaagtttctctgatctttaccgcagtttgggcattttttaacgcctttagcgatttctttgccgcatgccttacaagacaccaggttgcctgccataatatttcctcctatgtaaactatttcttaaaaactacatactataatgcctgtaaaataacctatagtcaataatattttgagaaaaaaagtattttaatgattttttagtcatgtattttaaggtcctttttagtatcggcagatcgttcgcattttccataggtttaatgaaaaaagagtggttgaacatgttcgtgatttcccgtataatcttgaaagataatataaaaactgaacataaaaaacagtggttttctagggttccgcaatgctgaattggtctggaccgagagaaaacacacagcaggttcctgctgtgacacgttgggataaaagcccgggagtttctgctcttttaatgaagagtgctctcccgggcttttttgattttataaaaaagggagtgtctgggatgaaaaagagattgctggatgtgctgatgctgattattggagcttttatctttgctttggccgttaatttattcgccattccgaatgatcttggagagggcggggtaacgggaatcaccctgatcttgtactatgtgtttgaatggtcgcccggggtgacgaatatcattttgaacgggattttattgattatcggatataaatttttagacggaaaaacaacgctttatacgatcattaccgttgtcgccaactcactgtttctgcatctgacgcatgattggcactcgccttcacatgaactcattattaatactatttttgcgggtgtgtttgccggtgtcggaatcgggatcattattcgagtcggtggcacgactgcgggttctgccattttggcgaggattgcgaacaaatatctcgattggaatatcagctatgcgcttttgttctttgatctgattgtcgtcttcagttcttatttcatcatcggtgcggaaaaaatgatgtttaccattgttatgctgtacatcggaacgaaggtgatggactttatcattgaaggcctgaatacgaaaaaagcggtgacaattatatctgagcataagcacgaaatcgctgaacaggtcaacacgctgatggacagaggggttacgctgctgtcgggtaaaggaaattacacggggcagtcgaaggaaattttatatatcgtcatccagaaacaagagctttccatgctcaaaaaaattattaaaagctgtgatacaaaagcgtttgtcattgttcatgatgtgcgtgatgtctttggtgaaggcttcgtcgatatctctaaataaaaaggatccctctgccggcgcggagggtttttttcttatgccggcagaagcggttatatccgtttcccgggaaatagcctgaaagctgtttcttaaaacgaagtggatacaatcggccggacgttttatactgaaaatatgatagagcgatagaaaggagcgcatatgaacccgttattggcaatttacccgagggctgtgttgtctgatacgtgctgtacggcggaggatgtcttttgcttttatgatgagaaaaggcgggtctatgtcgccattccgaaggaggatatcaccccgaaggagaaactgcttctggaatcatttttgacgcccgctgaagaaaaaggcgttttttttccggagacggcggcagcaaagaggtggcggcgttttctgctggaagaaggtccggtgcctgatgtcaaggagccgcgtgtccgttttatccattatgacttattgggagaacgggactggggggcattcacagaagcgctgcgccatttctggccggtttcatatacagttgtccggacggggagggatcatggcgtgattgtggaggaagaaaagctggaagcgccagattcggatgacatcgcatcttttgtgaagattctcgaaggcgatttttatttcagtgtccgttttttcgtcggaaggtattactgcaagggggaacgtctgcgccttcattatcagagagaacagcaatattgtcagatcggccggcgtcatctcccgcagctgagcacgctgaccgcggaaacggtatttccggccatgctcacggaggaaagcagagaaaagctctcagccttgcttcacgaagaagcggcgctgctgtttcagaaagaaccggagctgaagcatacgattcagacttttattgaacataactcaaacatgtcgctcacatcgaaaaaactgcatttgcaccgcaacagtcttcaatatcggattgataaatttgcggaacgctcaggtattgatattaagacatatcggggcgccctgctggcttatttcatttgtctgcaatatgaaaaatcacattaaatgggaaatgtgcacgaagacagcggtctttttttatgaacattgcctatatccgccgccgtctgacgctgttacaatcctatttaagaaagcgtttacaaataaagggggatatacatggcggaacttcggctcgagcatatttataagtattacgatcaaaaagaagcggctgtcgatgattttaaccttcatattaaagataaagagtttatcgtgtttgtcggtccgtcaggttgcggcaagtcgacaactttgcggatggtagccgggctggaagacattacgaagggcgatttctatatcggtgacacgagagtgaatgacatcgctcctaaagacagggatatcgccatggtgtttcaaaactatgcgttatatccgcacatgacggtctatgataatatcgcattcggtctgaagctgaggaagatgccgaaaccggagattaaaaaacgtgtcgaagaagcggcgaaaatgctggggctcacagagtatctgcaccgcaaaccgaaggcgctctccggcggacagcgtcagcgggttgcattagggcgggcgattgtcagggacgccaaagtgttcttaatggatgagccgctgtcaaatctggacgcaaagcttcgggtgcagatgcgggcagaaattattaagctccaccaaaggctgcaaacaaccacaatctatgtgacgcacgaccaaacagaagcactgacgatggcgacacgcatcgtagtcatgaaggacggaaaaattcagcagatcggcaccccgaaagaagtgtatgaacatcccgaaaacgtatttgtcggcgggttcatcggttctccggcgatgaactttttcaaaggaaagctgacggacggcgccattcagatcggttcagccgctctcagcgtgccggaagggaaaatgaaaatgctccgggaaaaagggtatgccggcaaagatatcatcttcggcatccgcccggaagacatacatgacgagctgattgtggtagaatcttataagaattcatccatcacagctaaaatcaatgtcgcggaattgcttgggtcagaaattatggtttattcccggatcggggatcaggattttatcgcccggattgacgcccgccatgacattcgtgccggtgaggaattgaccgtcgctttcgacatgaataaggctcacttttttgacagtgaaacagaaatcagaatccgctcataacgcaaagccggacagctggatgtccggtttttttgatgtaacaatttatgacgcataaccgatataaaaagtaaatagaagacagaaagcaggaaaacgatgaaacgcatgatcatgtgcatgtgccttttggctgccgtgtttacacttgccgcctgctcgggtcatgaggcaagcgccgaacaaagcattccgaaggcagaagcgcacagcgaaaaaaagtccgtaaagcggcaaatcaaaaaagagccggatacgtccgcctgggttcaaacgaaagggatggcgagactgccgattctgatgtatcacagcatttcagagggaaacagcctgcgtgtgccgaaggaagaattccggcagcatatgaagtggcttcatgatcacggctattatacgatgactcctgaagaggcctatctgatgctgacggaggataaggagccgcgtgaaaaatgtgttctggtcacatttgatgacggctatacagacaatgtgaaagcggcctatcccattttaaagaaatacaagatgaaagcgacaatctttatgatcggaaactttatcgggcataagaatcatctgactgagaagcagatgaaggagatggccgcccacggcatttccattcagagccatacgatgaaccatctcgaattgaacgggctcacaccgcagcagcagcgacgtgaaatgaaggactctaagcgtttatttgatcaaatgttcgggcagcggacgtctatgatcagctaccctgtcggacgatataataaagaaacattaaaagccgccgcctcgtcaggctaccgtatggcggtcacgacggagccgggagcggcgtctagagatcaggggctttacgggcttcaccgcgtccgtgtgtcgccgggcatgtccggcgcggcattcggctcttatattcaaaatgtgatgaaataacagagcctccgcatatgcggaggctttttttcagtttaatagaattgatgaagcagcagaagggtgacgctcacggtaatcgctccgccgattctggtcgacacttgggcgaacggcataagctcaagccgttcagcggcgctcaagatcgcgacgtcgccggtgccgccctggccggaatggcaggcattaataaccgccgtttcaatcgggtacagattcagccattttccggtcagaaaaccgacggccatcatcgtgacgacgattgataaaatggtaatgatgttgctgattgtaaacgccgcaatcagcttgtcccacggtgtcattgaaacgccgatcgcaaataagagcggataggtcacggctgtcgagaaaaagcgcgagacgccgaaggctccgttttcaatcgaagccggcgccagcctgaacagcttaatgagaacggcaaggacgagcatcacgactggagccggaagctgaaagaaatcatgcgccagcatgccgaccaaataaagggaaaccgctaaaataccgcccgaagcgaaaaaggacaaatcaaacgttttatcatcggccggctgttccaatgcgggagcggaatgatcagacttatcaaccttcccgttgcccgtccattccggtttgcgtttcccgatgacattcagcaaacccgataacataatggcgcacaggctgccgagcatgatggacggcagcacaagcgcaaaggcgtctccctgggacatcggcataatatcggagtagccgatggataaaggaatcgcgccttcaccgacaccccccgccataatcggaacgacgatataaagcagcgtgtgctgaaagccgagcccgagcagcgtcccgacgcataagccgacgatggcggccgcgatagacccggcgatcagcggaataaaaatcttaacgaaagctttgacgagcgtctctcttttcatcccgagaatactgccgacgacgataccggcaataaatagatagagaaagttggagctttccgtgaattctgttgttgaagtaataatgtctttcggaagcaggtggtagtagacgacagcggatggaataaaggttgcgagaatcgcagggccgccgatggaccgcacgatcggaatggattttccgatctggccgaaggtaaatccgaaaaaactcatgacggcaattgatgtcagaatgtcgctttttacatcacggctcatgacaaacaccgtaataagcaagaaaagcaggatatagataggaagaggaataatgccgattcttatattcattgctctggcaaaccagttatcagtccgttcctgtttttggattgaatccgtttgcaattttggttgaagttctcccatgcttgttcccccagtcgttatgtagtgaaaaaatatccccatttaaagtatactaaaaaatttaaattgttcatatattatgaatttactagaggacatgctttcttcacattttctttctcaaaatggcgatttggcgggctttttcaccgagaaaagcattttgttcgccacacgaataaaaaagaggtacgatatcaaagggacaaatatcctaggtgctgacataaaatctctacaaatccgacaataatcagtcacaatttcagcctgattttaggtatattgatctttttttttgggctgaatcgttgtaaagtaatgatattgaatcatttctatgacagccgctgtcccccagggtgtacaggctgatatttcaatagttttgacgaatttgtgaaacattgagcaaatatatcattttttgtgaaataccgagcaatgatttcactatgtttgtgaaatgttgagcaatttaccagattggaggaaaaacatcatgagtgagttggtattagcccgcattcaatttgcatctacaacattgtttcacttcttgtttgtgcctatgtctatcgggcttgtgtttatggttgctttgatggagacgctttatgttgtcaaaaaacaagagacctatctcaaaatggctaaattttgggggcatctctttttaattaactttgctgtcggcgtcgtcacagggattcttcaggaattccagttcggattgaactggtctgattattcccgttttgtcggggacgtatttggggctccgcttgcgattgaagcgcttttggcgttttttatggagtctatttttatcggattatggattttcggctgggaccgtttatctaaaaaagtgcatttgctttgcatttggcttgtatccttcggaacgattatgtcatctttctggattttgacggcaaactcattcatgcaggagccggtcggctttacgattaaaaacggccgcgcggaaatgaatgacttcggagcgcttttgacaaaccctcagctttgggttgaattccctcacgtcattttcggagcgcttgcgacgggtgctttctttatcgccggtgtcagcgcatttaaattattgaagaaaaaagaagtgcctttcttccataaatctttcaagctttcgatgattgtcggtctgatcgccggtatcggcgttgcgttcagcggacacatgcaggctgagcatttaatggaatcgcagccgatgaaaatggccgccagtgaagcgctttgggatgacagcggtgatcctgccgcgtggacggcttttgcgaatattgatacgaataaagaaaaaaacacatcagaaatttcaattccttacgcactgagctacttggcttaccagaagttcagcggcagtgtgaaagggatgaaaacacttcaaaaagaatatgaaaaaacgtacggaaaaggcgactatatcccgcctgttaaaacgacgttctggagtttccgcattatggcgggagcgggtgcgcttatgatttttgccgcgattgcaggctttattctgaaccgccgcaaaaagcttcatacgagcaagtggtatttacggggcatgatcgcactgatcgcattcccgttcattgcgaactctgccggatggattatgactgaaatcggccgccagccgtggacggttatggggcaaatgacaaccgcacaatccgtttcgcctaacgtaacgacgggatctctgctgttttcaattatcggtttcggcgtcatgtacttgattttaggcgcgctgcttgtcttcctattcgttcgtgaaattaaaaaaggtgcggaccatgatgatcacaaggatgttcctgtatcaacggatccgttcagtcaggaggtctaccatggggtcacttcatgatctttggtttgtactcgtttcagttttgtttgtcggatttttctttttagaaggttttgatttcggtgtcggcatttcgacccgatttcttggccataatgaattagaacgcagagtgctgattaacaccatcggcccgttctgggatgcgaatgaggtatggctgctgacaggtacgggagcgatcttcgcggcattcccgaactggtatgcgacgatgctgagcggatattatattccgtttatcatcatccttcttgctttaatgggccgcggggtggcgtttgaattccgcggaaaagtgaatcatttaaaatgggtcaaaacatgggactgggtgattttcttcggcagccttatcccgccgtttgtattcggccttatcttcacaagcttgttccgcggcatgccgattgacggccatatgaatatgcatgcgggtttctcagatattgtgaacgtgtattccgtccttggcggagcagccgtcacccttctttcattcctgcacggtttaatgtttgtcacactgcgcacgatcggtgatttacaagagcgtgcgagaaaaatggcaaaacgcgtaatcggtgttatctttcttgttgtacttgctttctttgcgatgtctgcatacgatacggatatgtttacacgccgggcaaacatcacgattccggtattcgtgctgattgtcatctgcaacgttcttgctgttgtgttcatgagcaagaaaaaagacggctgggcattcggtatgaccggcgcgggtcttgctttgacagttgcgatgatttttatctctctgttccctcgcgtcatggtcagctcgctgaaaagcgcgtatgacttaacagtagctaacgcgtcttccggtgattattcacttaaggtcatgacaattgttgcactgactctgctgccgtttgtcatcggcagtcagatctggagctattatgtcttccggaaacgcgtcagccataaggagcctatgacttattaatgggaaaagacctgtttctttataaaggaatgaagcggattcttgcgatcattacgggattaacgattatacaaacggccgccatcatcttgcaggcggaatggctgagccaggcggtaaccggattatttaacgggaagcggattgcttctctttatccggttatcggctttttcctgcttgcgtttttggtccggcatgcggtaaccgcggtccggcagaaaatcgtgtaccaatatgccgcgcaaaccggcgcagacttaagaaaaagatttcttgagcaattgttccgtctcggcccccgctttgcgaaaaaagaggggacgggccggatggtgacgctggcgatggaaggcatcagccagttccgccgttatttagagctgtttctgccgaaaatggtcagcatggcgattgtgccggcggccgttgttatttacgtgttttttcaggataaaacatcggctttgattctgattcttgcgcttccgattttgattgtatttatgatcctgctcggacttgtcgcacagaaaaaagccgatcgccaatggaagtcctatcagacgctttccaatcatttcgtggattcgctccgcggactggagacattgcggtttttagggttaagcaaatcacacagtaaaaacatctttcatgtcagtgagagataccgcaaggcgacgatgagcacgctccgggtcgcgtttttatcatcattcgccctggatttctttacgatgctgtcggtggcgacagtggctgtgtttctcggcctgcggctgatagacggacaaattctgctcggtccggcattgacagcgctgattctcgcgcctgaatattttctcccggtccgcgaagtgggaaatgattaccacgcgacgttaaacgggcaggaggcggggaaaaccattcaagcgattttggcgcagcccggttttaaagaagaaaagccgctcgaacttgatacgtggactgacggggatgaattacagcttacgcgtttgtccgtccgagaatcgatgtctgaatttcatctgtcctttaaagggaagaagaaaatcggaattatcggggaaagcggtgcgggaaaatcgacactcattgatgtgctgggcggctttttagagcctgcgtccggtgagatcaaggtaaacggtgaatcccgctcgcatctgcagtcagacggctggcagaagcagctgctttatatcccgcagcatccgtacatttttgatgacacgcttatgaataatatccggttttatcatcctgatgcttcccgtgaggaaacggcgcgcgctgctgattcagcgggtctttccggactgatccgcgatctgcccggcggccttgacggccggatcggcgagggcggacgggcgctcagcggagggcaggctcagcgtgtcgcgctggccagagcctttttaggaaaccggccgattctccttttggatgagccgaccgctcaccttgatattgaaacagaatatgaaataaaagaaacgatgaaagacctgtttgaaaacaaacttgtctttctggccactcaccgtcttcactggatgcttgagatggacgaaattatcgtgcttgatgacggcgcggtggcggaaatcggcacccacgacgaattgatggcgaaacaaggcgtatatgccaaacttgtaaaggcgcaactgggggaaagaacatgagaaaagaagaatggattctgccgtatataaagcaaaatgcccgtttgtttgttcttgtgatttttttaggcgcggtgacgattttttcggcggcctttctcatgttcacttccggttttttgatctctaagtcggcgacaaggcctgagaatatcctgctggtgtacgttccgattgtggccgtgcgcaccttcgggattgcccgttcagtctcacggtacgccgagcgcctgacggggcaccatatcattttgaaaatcgtgtccgatatgagggtgcggctttacaatatgctggagccggcctcgctcatgctttcatcccgttttcggacgggcgacatgctcggcattttggctgaggatattgagcatttgcaggatgcgtttttaaaaacgattttcccggcggtttccgctttgctgctgtatgcggcatccgttatcggactcggctttttttcctggccgtttgccgcttttgcggcgatttacctgtttatattggttgtattgtttccggttgtgtcgcttcttgtgacgagagcgaaaaacatgaggctgaaaagcggccggaatacgctctacagccggctgacagatgccgtgctcggcgtgagcgactggatgttctcgggacgacaggcggcctttatttcctcttatgaagagaaagagaaggcatggtttgaccttgaaagcaaacgtcagcggtttacgagatggcgtgatctcgccgcgcaatgccttgtcggcggcttcatattgatcatgctgttctggacggcgggtcagtatgcggacggcagcatcgccaacacgatgatcgcagcctttgtgcttgtcgtatttccattgacggaggcgtttctgcccctttcggatgcgctgacggaagtgccttcttatcaggattccatcaaaagaatgagtaaggcggctccggagctgcgaagtcgtgaggtgaagcagacagatgagatactggatgtatccgatgtgacacttacatttgataacgtgacgttttcttatgatcagcacagtcatgtgcttgaccgtttttccttcactctccgccagggggaaaaaatggcgctgctcggcaggagcggctccggtaagtcgacctctctcgctttaattgaaggcgccttagttcccgattcgggcaaggtgatgctgaacgggctggaaactgcggccgtgcaggagcagatttcctcagcggtggccgttttgaatcagaaacctcatctctttaacacgagcattatgaacaatatccggctcggaaacggcaaggcgagtgatgaagatgttaagcgtgcggctcggcaagtgaagctgcatgattatattgaatcactgcctgacggatatgaaacgtccgtgcaggagacggggattcgtttctcaggcggggaacggcagcggatcgcgcttgcccgtattctgctccaagacacgccggtcattatccttgatgaaccgacgatcggccttgatgcggtcactgaacgagaattgcttgatacgatttttgatgtctttaaagagaaaacgatcctctggattacacaccatttagcgggtgtggaaacagctgataaaatcgtctttttagaaaatggaaaagcagaaatggaaggaacccatcaagagctgcttgcagaaaacgaacggtaccggaagctttaccgtcttgatgttccgatcagaacataaacagccgcaaacgagcggctgtttttttgtgcggtttaaaatctcttcttgtttggaatataaataggagacagaagaggaggtacagagatgaatataatggattggacggaacaggatgtgaaagatacgctgccgaaacgggaggcggacagccataaaggcacgttcgggacggcgttattgctggccgggagcgatgacatgccgggagccgcccttctagccggattgggtgcgatgagaagcggtgtcggcaagctcgtcatcggtacatcggcaggcgtcattccgcttatcgtcccggtgctgccggaagccacgtactggcgggacgggtggataaaagccgcggcgggccagcccggggaaaccatccgggccgctgccatcgggccgggccttccccaaacagacgaggtgcagcaggcggctgatcagctgctttctggcgattatcccgtcatactggatgcgggcgccattacgaaaagaacctatccgaagaggaaagctcccgtgatcttgacgcctcatcccggcgaattttccagaatgacaggccttccgattcaagagattcagcagaacagagcggaatatgccgcggaatgggcggagcggcttcatgtcacgattgtcctgaaaggaaacgaaaccattatcgcttttcccgacggggaatgccgcaggaatacaaccggaaacggcgcgcttgcaaaaggcgggaccggcgacacgctgtcgggaatgattctcggcatgctgtgctgtcatcaagacccgaagcacgccgtattgaacgccgtccgccttcacggcgaatgtgcggaattatggacgaaagagcgctccgcccataccttattggcgcacgaactttctgaactgctgccgggtgtatggaaggaatatgaataaagaaaaggcgtcttcatagggaaggcgcctctttttgttttaaccttgatttcatcaggacataatacagcagcgacggaacggccaggccgatgacccaggcaatgtcgcctccgccgaatatttcagcgagcggcccgatgtaaaaggatgtattgatgaacgggatttctaatataatcgacaaaacgaaggcggccgctgtaatccaattgaccctgccgtattgtccgttgacgtcaaacatcgatttgacgtggtattttccgcggcggataaaatagtaatccacgaggttgatcgccgtccatggaattaagaaataactgatgaaaaagatgaaatttaaaaacagttccatgaaattgctttggcccaagagacttaatacagtacccgctgccgtcacacaaaggatcattaccactctcgttttcggcgtcaccttcagttttaaaaacggctccaaggtagtcgtggttgacataaaggctccgtataaattaaagacgttgatcgccatttgcccgaacaggacgatgatcagcataataaaggaaaacggaccgaacaatcggacaatctcatttcccgcattagcggtaaattccgggagcgccgtcgtcaaaatggcgccgagaagcatcatccagatggaactgactgacgtacctgcatagctgtaccaaaaagtatgcgatgccggtgttttgaccggcagataacgggaataatctgcgacatatggcgcgtatgccagctgccatgtggccaccgcgctgaccgccactagaaaaacaggcagatctaatgagccgggcacccagcttcctgaaggaatcggcagttgaaaaataagaatcgttgcagcaaaaaaaacggcaaaggaggtccaagagaggattttctgcattttgtgaatcagatcatgaccgtagatcgtgagtaaaaaacagatggcgcttaagccgataatacaccatgaagccggaatcgggacaaagctgctcagtgtaccggctgcgagaatcgtactgctcgcaaagaagcccaggtagataaacatgaccaaaaagagggcagaatcgctccgatcacgccgaattgcgcgcggctttgaatcatttgcggaattccgagctgaggtccttgtgcggaatgagacgccataaagattgcgccgataaaggttccgatcacaatggcggcgatactccaaaagagatcgagtcccattgtaacgggcagtgtgcctgtgactaacgtcgtaatatgcatattagccccgaaccagacggggaataaatctttagcctttccgtgtctttcgtcatgcggaatatgttcaatcgttcgcctttctactttcaatagataatctcctccgtatgttcttctttaacataaagacatagcttaacagattgacctgccgtttacaaattccagcatgcaggaaaaacattgtaaagcctcgctgacagccgttcaaagttttttgaaaaacggaacaaacactgccgcctaaacgatttaccagggattaaaaggtatggatatgcttactgactaatatgtatgaaggagaaatgtgtcaatcttttgacgaatggagccattattcgttaagctgaaagaatagtttactttgtgtaaatttcattaatgaaaaggggattgatgatatgtgtacaagtcttacattgaaaacgacagacggcaatcacctattggcgcgaacgatggattttgcatttcagctcggtacggacgtcgtgctttaccctcgtcagtacagctggaaaagcgaagctgacggcaggatgcataagacgaaatacgcatttatcggcatggggagaaatctcggcaatgttctgtttgccgacggcgtaaatgaaaaagggctgtcgtgtgcgacgctgtattttccgggctttgcgggatacgagaaagcggaacgggagggcacctgtcacatcgctcctcatgagtttgtcacctgggccttatcaaactgtgaatctcttgaagacataaaggaaaagctctcaatgctgacgattgtagagaagaagttaatgttattggatacggtgctgcctcttcattggattttatcagaccgcacgggcggctgcattgtcatcgagccgacaccggagggaatgaaagtatatgacaacaaacccggagtgatgaccaacagtccggaatttccttggcatgtgaccaatctgcgccattatatcggaatcaggccgcagcagtcagaaagcaaaacattgggcggaatgacattaaccgctttcggccaaggatctggaacgatcgggcttcccggtgattacacgccgccatcccggttcatcagagccgcttatctgaaagagcatttagagcctgccgctcatgaaacggatggcgttacggccgcttttcacgtgctgtccaatgtgaatattccaaaaggcgcggtgatcacagaggagaatgaaattgattatacgcaatatacgtcggtcatgtgctgtgacaccgggaactactactttcatctgtacgacaaccggcagattcacaaagtaagtttattccatgaagatcttgaccgtccggagccgaaagtatttgcggccgcggcggagcagaatatacaggagctgaattagctcaaaaaaaaaacaggacgcgattgtcctgtttttttatttaatacggatcagacggatggctttcctgttcagcctgttttgcggcttgtgctgtatcagtagtgccgatcggcccgccgctgctgctttcggaggcttttttcagcccttccgcaacacgttttccgtagtccggatctgcttttgtgaaattctcaatcatttgatcctgaatgtctttccggcaggaagaaagcgtattgaccaggtttgtgatcaattcggtccgttcaaattccgaaaatctgcggtatgtttcaccggcctggccgaagttattcggccggtcgatcgcttcccgcttcacatcgccttcgacatgaggtgtatggtctttcccatcctgctttgcttcggtgagtcctcccataatggacggctcatagttgacgtgcgggttttgtccttctgcccgatcgacccgatactgcatttgcccgccttcctggttggtggcgacatgctttttcggcgagttgatcgggagctgcaggtaatttgcgccgacgcggtaccgctgggtatctgaataggcgaatgtccgtccctgaagtaatttgtcatctgaaaaatcaaggccgtccacaagcacgcccgttccgaatgatgcttgttccacctcggcatggtagttttccgggtttttgttcagaaccaatttgccgatcggcttccaagggaaatcgtctttataccacagcttggtcggatcaagcggatcaaaatccagctcgggatgctcgtcatcagtcatgatttgcgcatacacttcccattcagggtaatcgcctttttcaatcgcctcatacaaatcctgtgtcgcatggttaaagtttttcccctgaatctcttccgcttccttctgtgtcaggttgcgtatgccctgtttcggttcaaagtgatatttgacgagcacggcttttccttcttcattgacccatttgtaggcatggacgcctgagccctgcatctgccggtagttggccgggatgccccacggcgaaaacaagaaagtgatcatatgagtcgcttccggtgattgggaaatgaagtcgaaaatacgctcgccgtcctgaatgttcgtaacgggatcaggctgaaatgcgtgcacaagatccgggaacttcagcggatcacggataaaaaagattttcaggttgttgccgaccagatcccagttgccgtcttcggtataaagcttaacggcaaaaccccggggatcacgcaatgtttccggggaatgcttcccgtggttgacggtagagaaccgcacaaacgccggagttttcgttcctttcttttgaaacactttcgctcttgtatatttagaaatctcctcgtctccaaaacttccgtacgcctcaaagtatccgtgtgcgccggcgccgcgcgcgtgaacgacgcgctcgggaatccgttcgcggtcaaagtggctgattttctccaaaaaatcataattctccaatgtcgtcggtcctctattgccgactgtcctgacattctggttgtcagtgaccggatggccctgccggtttgtcagcgtgtcttctgactcgcctttaccggtcgtcttactggaaagcgtttcttcgctgtttttgttattttccattgttgaaccctcctttttgaacggtaacaatatgcccagcagagccgttttttaaaaccgattttcaaaagaagcggttattccgcgatcggcgtcaaggacccgccgttccatatttcgcccttgttcagcgtccagctgttttgataaaggctttgcgcgccttgattggccgccggacttaattgttcatcccatgtcaaaaagtacgcggtctgagggtatttttgcctgatcgcattaataaaagcagcataatcaaagcttccgatattgccggacggaccggtttcggcaaaggcaaacggttttttcagagacagcatttcatcatagcctgatatcgcatacggatcagtgaagtaagcgtccagaccggtaatatccacataagatgagcctgggtagaagtctgttttaaagtctctgttggcatccggcgaatacacccacaaaaggttatccaatcctcttgtctctgtcatatagcggtatatcttcttgtaaagctctttgtacagcgagattctctcattgtctttttggttgtagcctgtcagcccccaccagaaccactcgccgttcatttcatgcagcggtctgaacagaacggtgacgccttgatttttcagctgagtaaggccgtcggcaattttgctgagcagcgcctcaagccgttttccttccacagttgaagggtcaaggatgtttttgtactggctgtttgagatggccgttttatagtttccggatggaaaggccggatttgcgagatgcaggctgacctgagggaggccgccgcttttccagtatgagattaagctgctgttgcagctgtaatcgatagtatcggtgatatccgctgtttccagccaccctctcccatagtcacagccgtagatggcgggagactgtcccgtcgcgtttttcaagcggttttcctctgtcattgaaaaagtgacatcactgtacccgccgaacgctccggacatgaccctgttttctgaacggttgggcaggtgggccagccagttcatgatatcttttgtcgtctgctgggcatttgggttgacgggataaacggtgtgagccgatatcggactggcggctcctaagagtaataaaacgatagacaggcagactgctaactttttaagcatataaaagacctcctgatttttaagatgatgaaggatgtgaaacgataacctcacaatctccttctataacaaaatctccggaatccgccggcacgataaagtgatcgcctttctgaacggggcatccatccagttctccgcgccctttaatgacgcttgcgagtaaataccggccgggtgcggggaatgatgctttcccgctcacatcccattgataaactgaaaagaaaggtgtttcggcgagtatcgtaataagagcatctccgatccgatgcttagtgctttttacattttcatcggtatggggaatgtctgttacgtcaattgctttctcaagatgaagctcgcgtttattcccgttcccatccgtccggtcatagtcgtaaagccggtaggtggcatcagagctttgctggatttcaaggacgagcgtaccttcacataaagcgtgcagtgtgccgctcgggacatagaaaaagtcgccgggcttaatggggatgcggcggagcaggtgatcccactcgtttcgttcaatgagccgaacgaaatcttcttttgtttgggcgcggtgccctaaaatgagctccgcgtcttttttgcagtccaacacgtaccagcattccgtttttccgagttctccgttttcatgccgatgtgcatatgcgtcatccggatgaacctgcacggataagtccatatttgcgtcaagaatttttgtgagcaggggaaaagcttcttctttcggatgtccgaacaggtcagggtgttcattccagagacggtgtaatgatgttccggaaaatggcccgttccgcacgatggatgtaccgtgcggatgagctgaaatcgcccagcactctcccgtccgctcagaaggaatctcatacccgaatgtatcgcgcagcttcgtcccgccccataatctttctttaaaaaccggttccaaaaataagagtttcgtcattttcccgcctcccggtttgccgtctctaatgcgcgctccgccaatacgagcgaaccggccgcgccggagtgaatccctaattgagggggaccgatgaagtgttcaatgtcgggcagatcaatatattgattcagccgctttttcacgtgctgacggatataagagaacagctgatgctgcttcatgacgcccccgccgagaatgatcttttccggcgaaagtatgagaatatactgcacaagcgcttcggcaatataatagccttcaagctcccacacttcctgctgatccgccagcagatatgcttttttcccccagcgtttctcaatggcgggacctgccgcgaggccttccaggcaatctgtatggtaagggcaattgcctttgtagccgtcgtccgggtgtcttctgacataaatgtggcccatttcaggatgagacagcccttgaacaaatctgccgttcatgatggcgcccgctccgatgccagtgccgaccgtcaaatagaggcagctgtccgcgtttttggccgcgccgaaagaagcttctccgagcgccgccgcattaacgtcggtggtgaagcctgcgggaatatgcagtgcgcttttgatcgtttgaagaatagggcagttccgccaggctgtcttcggcgtcgcggtgatgcacccgtatgtttgactgtcggggcggatgtcaatcggtccgaacgacccgatgccgatggcttctatcgggaaatctttaaagtaacggatgacttgtctgagtgtgtcatccggttctcccgtcggaaactccgccctgtccagaatggtgccgtctttttgtccggcggcacagacaaatttcgtgccgccggcttcaatacctccaagcatggctgtacctcctcatctgttaaaatccgttttgatcggaaacggctttgaaccagcggccgctttttttgacggtccgttcgcccccgttttccagattgacagatacaaagccgtagcggtttttataagcatttgtccaagaccagttgtccataaaagtccacaggtgatagccttttacatttgaaccttctccgatggcccgatgcacccatttgagatgttcccggataaattcaatcctgtaatcatcctgaatgatgccgttttcatcgcggaagcgttcctcgccttcaactcccatgccgttctcggaaataaaacattcgatatttccgtaatgttctctgagattggtgagaatgtcatagattcctttttcgtatatttcccacccgcggtgtgggttcattttccgtccgggcataacatacggatcgaagaaacgctcaggcaggaaaggggcgtgcggattcggaacatgttcttttgccttgacgcgtctcggctggtagtagttcacgcctaagaggtcaaccgtatgctcctgaatgaggcggagatcttctttctcgtaacgcggcagaaagccttccgccttgagaatctcgacaagctcctcaggaaattcgccctttacggcgggatctaaaaatgagcggttgaaaaaggcgtcggcaatccgggatgctttcagatcttcagggtgtgagcttctcggataagaaggcgtcagattcagaatgattccgatttgtccgtcctgtttcaattctctgtaggctttgacagcccttgcattcgacagcagggtatggaagccggcctgcaccgcttcttgaaaattaacgtgattcggatagtgaaagtcgtataagtagccgccttcaatcggcacaatcggctcgttgtgagtgaaccattttttcactttgtcaccgaatagcgaaaagcatgttttggcgtaatgttcaaacgcgtcaacggtgtcccggctgacccagccccccttacgctgaagggcgagcggcatgtcaaagtgaaacaaattgacaaacggctcaatgcgatgggcaagcatttcatcgatgacgtcctgataaaacgcgaccgctttctgattgacctcgccagttccgtccggaatcaatcttgaccaggaaatagacagccggaaggagttgtggccgatttctttcatcagccggatatcctccttgtattgatcataaaaacgtgacgtgtcgccggggccgacgccgttaaaaaaacggctcggctctttttcataccagtaatcccatatgttttggctttttccgtctttgtcggcggcgccttctgtttgggtggcggaggcggaagacccccaccagaatccttccggaaaacgatattgaatatttgattcagtcaattgatttctctcccttactgcgattttgattacatactcatgctgtcatcccgtgcttgctgctcggcctcggcttctttttcctttgccatgtttaatttgtccagcgctttaagaaacgggaaccagataataaacacaatacagaggttgaccagctgcataatgccgcccatgacggaattggtcgccataatcccgttaatgaaaagggggacggtccagggcacggtcacgccagtaggagggggcacgatccccgccgacatggccaggtaggtgacgagcgtgacaaccatcggtgcgatcacccacggaatgataatgatcgggttcatcacgatcggcaaaccgaaaataaccggctcattgacgttgaaaatgcccggcgcgagaccgagtttggatatctgtttcatctgtttgcttttcataaaaagcaagatggtgatcactatggccaatgtcattccggttccgcccattccgacggtgtaaatctccataaacggcttagaaataatatggggaatctcttttcccgctgtatacgcagccaaattttcgacctgtaatgtattccagatcgggtccatcacggaattgataatgatctgtccgtgaagtccgaaaaaccataaaatctgaataaagaaaacagcgattaatgtaggaatgatgccgcttccaagtccgacaagcggggcttgaaccgtatgataaatgacatcatgcagattggtgtgaaagatctgggtgacagccgcattgatcaagaggaagacggtaagcgtgataaaagccggaatcaatgcggcgaacgatttagcaacagccggaggaacaccggcaggcatcttaatcgttaagtttctctggacgattcttctgtagatttcacccgacaaaaaagcggttatcatgccgagaaacatcccttttgctccaagccggtcaaccggaatgacgcctgcgaccgctttgcccgtttccggctctaagacgaacggggtgagcagcagaaaagaaaccaatgcaatcgctccgccgaatacggcctccacttcgtagctttttgaaaggtaatagccgatcccgaagacgacaaaaatggacataatccccatcgtcgccgtcgaagcgccgccaaatccggattgaaagacagacagggcggagctgctcatgattttgtttaaaaacggcaggttcgtcagcacgacgaacaccgaaccgaaaatggtcagcggaaacgccagcataaaagcatcccgtaagacttgcaggtagcggttattgtttaatttgcccgcgatcggaacaaggaattggctgattttctcaaacacgtcttcacccccggctttttataaattctttgattgaaataagtcgagcatttctttgacgatctctttcattgagagcgctgacattaagtggtcttcagcatgcataaaaagcagggagacatccgtcttggcgccgccggcttctttttgaatcatctgaaaatggatgtcgtgcgcttttcccagttcttcttcagcctttgtcagaaaggtgtctgactcatctggccggccgtctttataagcgcgtatcgattgaataatacagctgcgggcattgccgctgtgaagaatcagctgaaaactgatctgttcatccgtgtacgtttccatgcttatcgcctcctttatttgttctctatcaaggaaacggcctgttcgtatgcttttttgccgtctcccatgccgtatgccatcatatcaatcacatcaacggtgatgtgaagcgggtccgcctctttctgaagctcgccttttaaaaaactcatctgcgggccgatcagtacgacgtctgcgtctttcatcgcttcttttgctttatcctgtccgactgcccaaatctcggcctcctcaccgatggagctggcgtaattctgcattttcgtcacaagaaggctggtggacatgcctgagctgcaggctaataaaattcttttcatgaggaatcccttctttcataaagttaaaacgttttcatgaatattataatcttttgaaattaaatgtctatacttttaaaatataaaagttttacttttcggatttttgacacaaaaaaaccttttaagattcaacttaaaaggtttttcatctcaagcgagccataacagccataaataaagtccgatcagggtgatgaataacgtcggaatggttaatatcagacctgttttgaaatacattccccaggaaattttcacgtttttccggctcagcacgtggagccataacaatgtcgccagcgacccgatcggcgtgattttcggcccgaggtcagaaccgataacattcgcgtaaatcaatgcttctctcagcagcccgtgagtgtccgttccgttgatggctatggcgtcaatcatcaccgtcggcaggttattcataacggaggagaggatcgcagcgataaaacccattccgagtgtgcccgcaaacaatccgtgatccgccgctttctgaataagctgagaaagaagatccgtcagtccggcattccgcaagccgtacacgacaacatacatgccgacagaaaaaaacacgatggcccacggggcgtccttgatgacttgtttcgcagggacggcggggcttcgctgcgccagaatgagaaaaatgaccgcgatggagccggcaacgaaggaaacgggtatcgacagcagttcgctgacgaaatatccgatcaataaaacggccagcacagcccacgataaccggaaaaggcgttcatccttaatcgcggatgccggatgtttcacaagaccggtgtcataccgtttcggaatgttttttctgaaatagagatacagcaccaaaatgcttgccgccagagaaaaaaggttgggcaccagcatgcgtgttgcatattcaatgtacccgatatgaaagtaatcagcggatacaatattgaccaaattgcttacaacgagcggaagcgaggtggtgtcggcgatgaatcccccggcgataataaacggaaaaaccagcttttcaggtaaattcaaagcccgcaccatcgccagtacgatcggcgtcaaaatgagcgccgctccgtcattggcaaacagggcggagacaacagcccctaagaccgacacatagagaaacatccgcagcccgctgcctttggccgccatggccatatgcagcgcggcccactcaaaaaaaccgatactgtcaagaattaatgaaatgataataatggcgataaaggcgagtgtcgcattccagacgatccccgtcacttccgcgatatcgtgcaggctgactgctccggcgatcaaagcgaggaccgctccgccgcaggcagaccagccgattgatatatgtttcggctgccatatgacaaacacaagtgtcagcacaaaaatcagcgctgataaaaccgcaactcccaagaatatatcccccttaccggcatgtaacagtgacttctttttgccgcaatgtctgtaaaacttcgtccttttcatctatctgctgcagaatcgagcaaaccagcgcgtattccggtccggacggatgaatggcatagtaccgccactggccctcgcgtctttcgcgcacaaggccggcgttctttaatttccgtaagtgctggctgatgccgggctgacttatatgaaaaatagccgtcagctcgcagacacaatattccttatcctccagaagcttcagcatcaaaagcctcgtcgggtcgcttagaagtttgaggcactggctgatcccttcggaacttaaagcattatgccgccgttccatgcgctcactccttttttacactattatataagcagacatttatataagtaaacggcaatataaaaaaagccggtcttgcactttttgcaaaaccggctcatgtttatttttggaacagttttttcgcttcatccattgctaatttatttcccagtgccgaataatcaagccaaggctgatcggcaattttatagacatggtttgctttcacggccttaagccctttccagacagcgcttttttgcaattctttataggcttgctgtgacttgtcgtctctgttaacgaccacgaaaatcgcatctgcgttgtaatcaggcagcacttcttgagaaatgacttcataagggcgggaggtattcatttctttaatgccgtcagccggtttcagcttcagatcgtcaaacagaatcggtcccatcgggcggcgtgtgctgaagacgcgaagctcttttgcgttcacgcggatcgccatgactttggcgtttttccctaattccttattcatcatggatctgacttgttttgtttcatcttcgtaatcttgaataaatgttttcgcttctttttcacggttgacgatttttccgatgtcttttaaatgatcacgccatgtgcctttatcaaggtcgaaaacgtgtgtgtttccgattttcttgtatttagacacatcttttcccgcaaattctttatcaagataaatgttgtctggattcagctcaagtaaagcttccatatccgggtctgaggcaggtccgagttttttcgtgtctttcagctgatttttcacatgagggagaaaatcttttaattctccgcccacgacggaaccggcaggtgtaacgccgagagccagcagatcatttgtcaggtgaatggacatcgaagcgattttatgatcgccggatttcttttttgactccggctgtgatgaatcggattggcaggcagccagtaagaaaatacacatgaaactgatgagcgcaattatttttttcatgggaatactccttgttttatgatttgattttcatgacgagatagagaaaatacggcgcgccgatggctgccgcaaccacgccggccggaatggcgttcggctgaaacaaagaccggccgatggtgtctgccgcgacaagaatgacaaggccgattaatccagcaatcggaataatatgctgatgcatggtgccgacgagccgtcttgccaagtgaggggcggcaaagccgataaagccgattccgccggccatcgcgacgctcgcgcaggacaagccgaccgctatggcgatcagcatgatcctttttctctgcacgtgtgcgccgagccccgccgctgcctggtcaccgagcattaaaatattcaaagaccgggcgttaagccatgcaagcggtgcgagaatgccgatccagggcaaaagcgaccacacgtgaatccaatctctgccccagacgtttcccaccagccagcgggaagcgaaggtataagtttcttcattcaggcgcagcgacataaacaatgtaacggcgctgaagcccgcggaaacggcgatcccgaccaacagcatgcggatcgttaaaaaaccgttcagcctgtcgtacgtaagcactacgatcagcagggcggcgagtgttccgcccgcaaacgtaaacagcgggatgaacatcgacgcctgcgcctccagggaatgaaagaatgtgatatacatcatcaaaccgaaggaagcgccggcatgcagtccgagaatgcccggatcggcaagcggatttcgggatacaccctgcaaaatagcgcctgacacgcctaagccgataccggccagcatcgtcaccagtatccgggggagccggtaatcgaataaaacggttgtgctttgaaacgtgccgtaaccgaacagcgtttttcccacggtgaggggagaaagccggaatgagcccgtgtgcagcccgatcagaataatgcaaacggcgatgaccagcagaacgagacctgccgccgccgctttttttgtttctttctgcactttcatttataagtctctcccttccttgcgggcaatataaagaaagaaagggacaccgacaagtgccaccatgatgcctatcgccaattctctcgggggactgaccgtgcgtgaggccaagtcggccaaaatcaaaagaatcgcgccgagcaacgcggacatcggaataatcagcctgtacgtaacgccgacgatcttgcgggcgatatgaggaatgaccagcccgacaaagccgatcgcgccggcagcggaaacagacacaccggcaagaacgacggcgatcattaatcccgcggcacgcgtcagagccgtgttcacccctaaattcgccgccacgtcatttcccattgagagaagggtgacggaccggcccatgaatgtcgcgagaatgatgaagaccgcaatcacgggaacaaggacttgtaaatgagcccacttgatccccgacaccccgccggcgtaccagaaggccaaatcctggcttaaatcgtaataaatcgctacaccggtactgagtgaatgtaaaagcgcggccacgaccgccccggcaagcgtcacctttaaaggtgtcatgctgccttttcccgccgcactgataaagaaaatcaagccggtgcttgccagtgctcccaaaaatgacatcatcatcagcagggcgtatgacaaatgagggaaaaaagcaaagctgagcgcaacaacaaacatggcgcccgcgtttacgcctaagacacccgaatcggcaagcggatttctcgtgacaccctgcatgagggcgccggctgcggcaaaagcggctcctgtaacggccgcgccgagcactctcggaagacgcaattcatgaatgatctgctggcccgttatgttcggattgtaatcagcaacagccgaccaaaccgtatgtaaagtaatgtctttcgcgccgaatgagacggcgaaaaaaatagaaacaagcagcccgatcaccgcgatcaggaagaaaaccccgttttttaagatgctgatcagacggcttgcggacgtgacagaatcgctcaaaaatcaattcacctacttttatgatcattgtccggcatttattgaatatgagaatcattttcatttgaaccatcatattataccgggccgattttcaaaacgcaatagagtgttcaacaatgatgcccttttttctttcatgtttatattgtaaaaaagaagtgaaaaacgtgaaagaggaaatcgctatattcagaaaggagggaggcaaatggcgggagaaggaaagcctttgccgattgaattttaccagagaccgtcagtggagcttgcccctttattgctcggctgtctccttgtgaaggagacggatgagggaacggcttcaggttatatcgtggaaacggaagcttatatgggagcggatgaccgggcggcgcacagtttcggcaaccggcgcacgaaacggacggaaattatgttccatgaggcgggccgcatttatacatacgtcatgcacactcatacattaatgaacgtcgtcgcctcggacatcggcattccgcaggccgtgttaatcagggcggcggagcctcatgaaggacagttcctgatggagagcaggagaccgggcagacccccgagagagtggacaaacggcccgggaaaactgacgaaggcgatgggcatttcaatgaacgactacggcggcatgatcacggaaccgccgctgtatattacggagggctttacgcctgaacatatatcaacaggcccgagaatcgggattgacaacagcggagaagcccgggattatccgtggcgctattgggtgacggggaaccggtatgtctcacgctgaccatgtttataaacgctgataacaggggaaagacaaggtaaaagaaaggggattcagacattgaaaaaatttttcaaaacgattatcaaatgggcgcccgtcatctatccgattatcagaaaaatcataaaagaacggaaggcatctaagcggaaccgcatgtccgcatcccgaacagccggctgatccggctgtttttttacggtcttggcatcggattgccgcattgacttgaaatcctccccagtatagaatttacatacatttaccccttcctcattctttttgcccatttttcacatctgcatctgatctgataggaggtttttctcatgcttcatgggcggcttcgtgaacttctgcgcttgcttttagctgctgaaacaccggttacaagctcagtcatcgctgcaaatgtaaaggtaacgacgcggacggtccgcaatgacataaaggaactgcaaaccattgtagaaaaacacggcgcatccattcaatctgtcagagggagcggctataagctgctgatccggaatgagcagccgtttaaaaactggcttcaggacaatttccagcagaacagcaccgtaccgatttttcccgatgaacggatagattacctgatgaaaagaatgcttctggccgacggctacctcaagctggatgacttggcggaagaactgttcatcagtaaatccacacttcaatctgatttaaaagaagtcaaaaaacggctccgcccctatgacatcattttggaaacaaggccgaactacggctttaagctgcgcggcgaagagctccgcctccgttattgtatggcggaatacttagtggacgaccgcgagcccgagcctgatctcctgagtgaaaaggccggtattctgccgaaagacgacattcatgtgatccgcacagccattatgaagcaggttcgaaaccataagatcccgctttctttcttcggcctgaacaatctcatcatccatatcgccattgcctgcaaacgaatccggacagaaaactatgtatctctcattccggaagatcttcatgatattaagctcgaaacagaatatcagtcagcggaagccatcgtaaaagagcttgaatctgcgctttcggtcacctttcccgaacaggaaaccgcctatatcgccattcacctgctcgggacaaagcgcatgacccagtcacaaatggaaggaaaagagcttacaaggctgatagacggggaaaccagccgtttgacggaggccatgattgaagccattgagcgggagctgaagctcggaatcacggacgacaatgagctgaaagcgggtcttgcgctccatatcaagccggcgattaaccgaaaccggtacggaatgaacctgagaaacccgatgctctccgccataaaggagaattatccgctcgcatttgaagcgggagtgattgcgggaatcgtgatcaaggagcaaaccggcattgatattcatgaaaatgagatcgggtatttggcgcttcatttcggagccgctattgaaaggagaaagacggaacggccgcctaaacgctgtctgattgtctgtgcgtccggcgccggcagcgcgcagcttttaagagaaaagctccgttcccggttcgcaaaacgtcttgaaatcgtcggaacggctgattactgcagccttgaccagctttcctttgagtcgattgattttgtggtcagcacagtgccgatcaaaaaagacctgcccgttcccgtattgaaggttcatacgctgctgggcggcggggattttacaaaaatcgacgccatgctggaagaaaatcgggaacaattgaactttctgaaaccggagctggtatttttgcagcaggatctggagacgaaggaggacgtcatccgttttctcggacagcaggttgcagaagccggcctcgcttctgattctctgaccgattctatttttgaaagggaagcgatttctcctacgagtttcggcaatcttacggcgattccgcacccgctcgttccgcagacagacacgacgttttgggcggtatgcacgctgaagaagccgattgactgggcggataagcgtgtccaatttgtctgcctgctctgcgtcgagaaagaaagcaaagccgacctccagcatatgtacaaatggctcggcggcatgttggatgatccggccgcggtaagccgtctcttaaaatgcacaacctatcaggaggttttacgagtattcagagacaaacgatcagagaaagaccgggatacaccttttttccgttagcagcggaaaaagcctgagtagttatgaaagcgatttcataatatgatgttactaacatcgagacatacaaaatatcaaactttcaggaggtcttttacatgaatatattactcgtttgtgcagcagggatgtcaacaagcttactcgtcaccaagatggaaaaaagcgcgcaggaacaaggaaaagaatataaaatctgggcggtgtcaggcgattcagtcaaccagcatattgataaagcggacgtattgctgcttgggcctcaagtccgttatttgcttccgcagctgaaaaaattgggtgaatcaaaaggagtgccggttgaagtcatcaataccgtccattacggcacttgcaacggagcggaggttctgaaatcagcggaacagctcggaaacgcatcgtagaaaggggcgggccgtgtgaataaggtgaaccagtttttagaagagaaagtcatgcccattgccggaaaaattgcctcccagcggcatctgcaagcactgcgtgacggaatcatcctcaccatgccgcttatcatcatcggttcattttttctgatcatcggcaacctgccgattccgggatatgcggatttcatggcgaagacgttcggaagcgcctggtctcaaaaactgcaatatccggttgatgcgacctttgaaatcatgggccttgtcgccgctttcggaatcgcctaccgcctggctgaaaaatacggggtggacgcattatcggccggtgcgatatctttggcggcgtttctcttggcaacgccgtacaaagttccgtttctgccttccggcgcaaaagaggaaatcatggtgggcggcggcatcccgctgtctctcatgggaagcaaagggctgtttgtcgcgatgatcatcgccatgctgtcgacggaaatttaccgcctgatcatccagcggaatttcgtcttcaaaatgccggacggcgtgcctccggcggtcagcaaatcatttgtcgctttaattcccggctttgccgtcatctttctgatctggggtgcgcgtttaattgtcgaagcgacgccgtttgaaagccttcataacattgtaagcgttgtactggggacgccgctctcgattcttgggggaagtctcggcggaagcctggtagccgaagcggttcaaatgcttttgtgggcgtgcggattacatggggcgaacattgtcggcggcgtcatggcgccgatctggttcggagcgatggatgccaaccgtgttgcgtttcaggcaggcgatgcgctgccgaatattttcacccagcagttctttgaaatctggatcaacatcggcggaagcggcgcgacactggcgctcgtggtcaccatgtttctccgttcgcgaagcaagcagatgaagcagcttgggaaactcgccatcgggccggctgtctttaatattaatgagccgattattttcggaatgccgatcgtcatgaacccgatgcttctcattccgttcatcatcacaccgcttgtcacactggtctttacctatatcggcatgagcacaggcctcgtcgccaaacctgccggcattgccgtcccatggacgatgccgccgattttctccggctatcttgccacgggcggaaaaatatcaggggctgtcatgcaggcgattaatatcatcacagcctttatcgtgtactatccgttcttcagaatgtgggattcgcaaaagctgaaagaagaaaacgaacttgaacaatcgcaggcgccagccgtacagggagacgaaaaagccgtgctgtagagaaagggagtgaaacacatgaatgaaaaaatggaacagaccatttttcagatcatcctgcatggcggcaacggcagaagcgcatcaatggaagccattgccgccgcaaagcagggggacagagccatggccgaggaaaagcttcaggaagccgcaagggaactgaccgaagcccatcattaccagacagaattgatccaaaatgaagccggcggagaaaaaacagacatgacgcttttaatggtgcatgcgcaggatcatttaatgaatgccatgaccgtgaaagacttggccgctgagttagtcgagatttacgaaaaagtgagtctgcaagggggagcaaaaatatgacaaaaagaattaaaattgtaacgatcggcggaggttcaagctatacaccggagcttgtggaaggcatcattaagcgctatgaggaactgcctgtcagagaattatggctcgtcgacattcccgaaggcgagaaaaaactcaatatcgtcggcacgcttgcaaaacgcatggtcgaaaaagcgggtgttccgatagagattcacctgacgcttgaccggagagaagccttgaaggatgcggatttcgtaacgactcaattccgcgtcggtctccttgaggcccgcgccaaagacgaacggattccgttaaaatacggcgtaatcggccaggagacaaacggtccgggcggtttattcaaagggctgcgcaccatcccggttattctggaaatcgcgaaagacatcgaagagctttgtccgaatgcgtggcttgtgaatttcacaaaccctgccggcatggttaccgaggccttgctccgctactcgaatctcacaaaagtcgtcggcctctgcaatgtgccgatcggcattaaaatgggcgtcgcaaaagcattggatgtggatgtcagccggatcgaagtgcaatttgccggactgaatcacatggtcttcgggttagatgttttcttagacggcgtcagcgtgaaggatcaagtcatcgaagcgatgggagacccggaaaacgccatgacgatgaaaaacatttccggagcggaatgggagcctgaattcctgaaggcgctcgatctgattccttgcggctaccaccgctattatttcaaaacgaaagaaatgctcgagcatgaaatagaagcttcacagacggagggcacacgcgccgaggtcgtgcagaaggttgagaaagaactgttcgaactgtacaaagatccgaatctcgccatcaaaccgccgcagctggaaaaacggggcggagcgtactacagtgacgcggcctgcaacctgatcagctccatctataacgacaaacatgatatccagcccgtcaatacgataaacaacggcgcgatcgccagcattccgaatgactcagcggtcgaagtgaactgcgtcatgacgaaagacggtccgaaaccgatcgccgtcggtgatctgccggtgtctgtccgcggactcgtccagcaaatcaaatcatttgagcgcgtcgccgctgaagcagccgtcacgggagattatcaaacggcgcttcttgcgatgacgatcaaccctcttgtcccgtcagactccgtggcaaaggccattctggatgaaatgcttgaggcccacaaagaacatctgccccatttctttaagtcgattgaagcataagagcagtaaaaaaacccggattcgcttccgggttttttgcttattttgattcgcttagtgaggcgactttcgccgtccagccgaacacgtcggcttccgcgcctttttgaatgcctgtaatggtatcatacaatttcttcgagatctctccggtttcaccgctgccgatgacaagactttcatcattccagatcagttcgccgaccggagaaatgaccgccgccgtaccggttccgaatgtttcttccaatcggccgtcacgatgcgcctggatgatttcatcgatcgaaatcttccgctcagacacagtcagtccccaatgtttgagaagggtgatgacggaatttctcgtaatcccttcaagaatgcttccgttcagctccggcgtcacgatttcgccgctgattttgaagaagatgttcatgctgccgacttcttcgatgtatttcttctcaatgccgtcaagccataaaacctgggaaaatcccttctcttccgcaacctgctgcgctttcaggcttgatgcgtagttgccggcggttttcgcgtttccggtgccgcctttgacggcgcgcacgaattcgttttccacggcgatttttaccggtttaatgccttctttgtaataagagccgaccggggaaaggatgataaacagcttgtacgtatgggatgccgctacaccgaggaaaggctcggtcgcaataataaacggacggatataaagggaagtgccttccgctttcggaatccagtcttggtcgatggctacgagctgtttcaggccttcaagaacaagctcttcatcaatgagcgggatgcaaaggcggtcatttgactggttcaggcgctccatatttttctccggtctgaacagaagcacttcctgatccttcgttacatacgctttaagcccttcaaaaacggtttggccgtaatgataaaccatggccgcaggatccattgagatggactgataagggataattctcggatcataccatccttgatcggcgtcgtaatccataacaaacatatggtcggtgaaaattctgccgaacgcaaggttatgggggtccggtttcggttttttggctgaagtcaattcaacacgaatgtcttgtttcataatgttctgtctccctattggtgttattgtcaaacttatttgaaaataatttatattctattgtataccttcaacaaatattcgcaatagttttcctcaaatttgtgaaaaaatcaaatcacataaaaagcaggggagagaatgccccctgcgtgttcgtttttacatattctgtaatcatcgtgctcagtgaaccgtcaccttgccggttttgtaaaactgctccattgctttatcgacgtacacccagcccttccaggcgatatggatggtgtctttcataaagtacggatcatattcgtgcccggataagtcggcaacctgaaagcccttcgctttaatttgcttagtgacttttttgtagtaatcagtccggccttttttcgggaagccggtgtagtcataccattttccgttgaccggaataactacgaacatcggttcagcgccggcatctttcagaatgtccagcatatcctcaaagtcgtgatattcgactgatttggcgtacgttcttcctttgttgattcctttcactctctttactttcttcttaatctttttataagaagcgtcatcgatatagaaaggattggacttggagctccgttctcctaattgagcggcggctgtttttaactctgaccacgatttccctttcaggttttcagagatcgtccgttcagggcccttggtttctcccattgaataataaagatcttttttctcaagcagagaataataagctttggcagccggcatgaccgctttcactttccatgattgtccgttgaccattcccttgtataattcagaaaggacggcatcatgctgaacaactttaaaacggagcatgcgcttcatcatgttctttttgaccgcgggatcaatctggttattaaatgctaaatccaatgcctgaagtgatgaaaaattcggcgcaaagtgctgttcatcagaaccttttttgataaaccattgcggagaaacaatgaataccagctttttgcccttcagctgctgataatgcgccgcaaagttcacggcgtgtatcaaggattggtccccgccttttccgacaagataaggcgtaaagccttggttgttcacttggaaatagttggacgggtgaaactcatccagtcttgaaagctcggaagaaccgaaaatcggcatatacttcgagtcttcgaacattttgttttgcagatagaggccctggaacatattcggatttaaggccgctgccgactcttcgacacgtttttcaggaatgaagcgcgtaagccatgaagccggaactgcgatagctccgacaaacaggacaaacgctaaaataattggtccaaagaaacgctttttcatttacttcaactcagtcagtttgtttacaatgttgtttggcgtattccactcgtcacggtcaaattcagtgatcggcactgtaatgccgaagcggttttcgatggcgacaagcagttctacagttccgaaagaatcaagcagtccttcttcaaagatttcaatatcaggattttctttcacagcgtcctcctgacaaacttcagctaatacgtctaatacttcctgtttaaattccatgtgttttcaatctcctttagtgatgaaatggttttcctgagaaaatataaaatccgaaacatacgaaatggaatgtgatgacgatggctaaaaaggccgtaaaacgattggcgggcagccacttgtatttcttattccatttctcaaaaaagttatacccggtcattaatacggcgtggtaaaggccgtatataatatattgcagggcgagtccgtgccagacgcccatcagcatgaacagcaggaaatacccgatgttcgagacggccatccggttctttatccattttttctttgtcatccagaatacaaagcgcataaatacgtagtctctgaaccagaaggataaggacatgtgccagcggttccagaagtctttaatgtttttgctgataaacggcttattaaagttttccggagatttgatacccatgatatagcttacaccgacggcaaacatcgtgtaacccgcaaaatcaaaaaacaggtacaagctgtatccgtacatgtacagcacattaccccacagtttactgtgggtgatatgaggcagattcataatgaaatacgtgttaatcgcatatccgataatgaatttgtacaagaaaccgataaaaattttatgaatgccggtatacagtaaatcagcgtattctccctttgtccatactttctgttcgtccttggcaaatctgcggtatctgtcgatcggaccggaagaaatggtcgggaaaaacataataaagtacaaaaggcggtgaagcggcattttttctttaatcagtccgtctctcgtttccatgatcagctggacgcctttaaatgtcaaataagaaattcctaagaaactgatcaggttatgaaccggatgatgaggcgccggcgggaagaaaaacggccataatttagataaaaacaggggtaaaatggacgcgatcacggccatactgaagacaaagccgctgttggctttcagtctgtaagcgagataacccctgattaaaagcacctgccacagcgtaaagatacatagtgcgatcacgccgtgcagatcatgcgcgaaaatcaaagccaatacgatgatggatataaacatgttgtatccttggaatctcttgccgttcagccctaaaataatcgtcggcaaaagaaggattccaagtaagataaagaagaaaaacgagctgtaaggcgtcatacaagaacctcttcgccaatgcgtttacggtcgatttttccgttcgcagtcatttgaatgtgatcctgataaatgaattttctcggaatcatgtaggccggaagcgaagcggccagttcttttttaatggcgcttgtcagctggaattctttttcaaaatcatgtttttcaggcacgatggcggcaattaaatattcgactggtccgttaggctgatacgggatgacaaccgccgtctgcacatattgagactgccttacatgtacttcgatttcctccagctccatgcggtagccgtgaagcttaatctggaaatcaaggcgtccttggcagaaaatctgaccatcctgaacataaccggcatcacccgtgtgatatgcccactggccgtcaattgagaaaaacgctttttccgtcagagacggttcaccgagatagcctttgctcacgctcggcccggcgatgatgatttcccctttttctccgtccggaagcttattcccgttttcatccatgatgaagatattcatatcgggttttgcaaaaccgacgggcagagattcattttcatcgataatctgctgcgtaatttcaacggaggtgacggcaaccgttgtttcagtcgggccgtatgtattgaatacgcgggccttcggaaaacggtttaacagttcctgtgccacggcagccggaagcgcttctccgcaaaacataaatacttctgcctcaggcaggagctcctgcgtaaagccggggtccatcagacacatttggacgaaagacggcgtcgatgtccagacgttcagtttggatttctccagctcttcaaatagtactttcggtttattgattttgtctttcgttacgcagtgcagcgtacctcccgtttgaagcgacgggaaaatgtccatgacagataaatcaaaagaaaacggagcttggtttaagaatgtcttacccccgcccacaggaaaatccctgcagatccagtcagtgaagctttgcaggttatcagccgatatctgcacgcccttcggatttcccgtgctgccggacgtgtaaataatgtaaaacgtatccagctcttttacccagttctcacggctgaggtctgcatctccgtcagctgcaagctcttcgggcgtaacggttttaatcagattgcttcccgtatcgactgcatcgcccgatacgctgataagcagctctgcgcctgagctttcaatgattttgacgatccgctccgccggaatggaaacatcgacagggatgtaagggcggcccgctttgacgcttcccaagaaagaaacaatcatattcggctccatatgtccgtaaaccaggacaggcgctttcgaaccgtcagctgtatgtttttgaatgccggacgcaacccgctccgacaaatcccataattccccgtaagtgagggaatgatctaaggaacgaaacgcttcggcctgcggcttggcgtctgcgtatgtttttatagcatcaagtagtttcatagttatcctccccgattagaaatcgttgtaaatataagtgccggtattcgctgtatgaaatccatacatccaaaagagcaatactaatatcagaaaataaaagcccgtatgaaacgtccatttgatcaatgtattttcataagcacgttttaatttttgcatcatattcaaaattccttccccgcgtattcaataattacaccagtatatgacgattagattaacaaaaagtttcaaaatatgtctaatatcctaagcttaaaatttccttaaaaatgaatgagaaacaaaaggatggaaaacacgcatgtataaattggcaaatgatcatactaaaaaggcgctgttcaggcgggatttttaacttatcgtaaatataaacgaggtaaaaaaattttggcggctttttcttaagcaggcttgtgccgaaccccaagggagaagggcgaaaagccgtttccggcaggatagctgataaagcgccgcatcttgtgaaatgaggaagaaattattatgatagataaggtagcagaaaacgtgaaaaccccaattcaacactactgttatcggctgactgtgaaagccttttaatagaaaggaagaggaaaatgaatcaaaacaatatggggggcagccaaaagacgcccgagaaagaaagcatgggccgcattttgtggcagctaacccgccctcatacattgacggcatcgtttgtgcccgtacttctcggcaccgtattggcgatgttttacgtaaaggttgatttcctgctgtttttggccatgctgttttcctgcctttggatccagatcgccacgaacttattcaatgaatattacgattttaaacgcggtttagatacggaggattccgtcggtatcggcggagcgatcgtccgccacggcatgaagccgaaaacaattctgcagctggcgctcggctcttatgcgattgctctcgtgctcggtgtttatatctgcatgagcagcagctggtggcttgcggctatcggccttgccggcatgctgatcggctatctgtatacgggcggcccgctgccgattgcgtatacaccgttcggggaactgttctccggcatttgcatgggctctgtatttgtccttatttcttttttcattcagacaggcagaattaatgaacagagcattttgatttccatcccgatcgccatcctggtcggagcgattaacctgtccaacaatattcgtgatattgaggaagataaaaaaggcggacgtaaaacgctggccattttgatggggcatagaggggccgttatgatactggcggcatcttttgccatcgcttacatctggatcgtcggtcttgtcatcatgggttacacaagcccgtggctgttcctggtctttttgagcgtgccgaaacccgttcaggccgtgaaaggctttgtgaaaaacgaaatgccgatgaacatgattattgcgatgaaatcaacggcgcaaaccaatacattcttcggattcctgctttcaatcggactcctgatcagttatttccgctgatcaaatgaaagggcaaatgctataaccggcatttgcttttttttatgacataatcttcacgatattgtaaagaacctgaccgcggactgacccgtctcatatatggacagcaaagcaaggagatgaaaaaaatggacttgtcaacagcccatatggatgatttaaaaacggtcatggaagattggaaaaatgaattattagtttataaattcgctttagatgagctggatacgaagttttctatcatcagccaggaatataatctgattcacgggcataacccgatcgagcatacaaaatcacgcgtgaaaagttttgaaagcatcgtcaataaactgatgcgcaaaggctgcgatgtgacgacgcaggaaatgaaagagcatattcatgatatcgcgggtgtcaggattatctgttcctttatttccgatatttataatgtcgctgaggttctgaagcagcataaggacctgaagatcgtaaaggtgaaggattatatcaaacatccgaagccgaacggctaccgcagcctgcatttgattattgaaattcccgtttatttgacgaatcgtgtggaatatgtgaaggcggaaattcaaatccgcaccatcgccatggatttttgggcgagccttgaacacaaaatttattacaaattaaataacgaagtcccaaagcatctgaccgacgagctgaaggaagcggcggacatcgcccattatttagacgaaaagatgcttgggattaagaaagaagtcgattaaacgattgacccgtcacaaccagccggaccgctattatacgcagtccggctggttgtttatccgtttatgcgcagctgtacaaattttcgcctgcccacctgaatcgtcatgccgtcttctgcggtaatgacggtatgaagggcatccgttttctccccgttcactttgattccgccgttttgaatcatacggcgtgcttcgctttttgaagaaaagagtccaagcgtgacaagcagctcaataaggggcacggtcttttctccgtcccatatgacggttttcatatcttcaggcaggctgttttgctggaagacacgtttgaaatgccgctctgccgcatccgccgctttcgtgccgtggtacattctgacgattgtacccgctaagatcattttggcatctctcggatgaagctttcctgattccaaatccttctccatctgttttttctccgcaggctctaagtctgtcgctaaatggatatatgttttcatcaggctgtccggcaatgacatcgttttgccgtacatgtcgttcggatgctcgtcaatgccgatatagttgttttttgatttagacattttttcaacgccgtcaagaccttccaaaagcggcatgaggatgacgacctgcttttcttttttgtagcgttcttggaaatggcggcccatcagcacgttaaaatgctggtccgtaccgccgagttcgatatcgctttcgagaacgacagaatcgtaaccctgcatcagcgggtaaaagaattcgtgaagtgagatcggtttttgcatggcgatgcgctcctcaaagtcgtcgcgctccatcaggcgggcgacagtaattttccccgctaattcaatcacatcttccagattcaatgtcttcagccattttgagttgcagtgaagttcaactttgtcttgatccagcaccttgccaaactgttcaaaataggttttggcattgtgttggacttcttcatcagtcagctgttttctggcttgcgacttccccgtcggatcaccgatttttccggtaaagtccccgataacaagctgtatgatatggccgttttcttgaaattggcgcagtttgtttaacacgacggtatggcccaagtggacgtcgggtgcggacggatcaaggccgagtttaatgttcagcggcttgccggatgccactgatttggcgattttatttctcaattcttcaggcggtatgacgtccgcggcgccggtcatgtacaaatccagctgcctttgcacttctttttcctgatcattcgttaaagtgattgattccatcttttacatcctcctttttttagccaaacaaaaaagccgcatcccaaaaagggacgtggctgtatgcacgcggtaccaccctgattgaagacgaaacgacgtcttccgctcattcgaataacggtttcccgttctttgctactgaagttcacaaagaaagctcagggaggtaattcacgtttgtctttgtgccggcttgcaccatccgccggctctctgaaacagggagacaatccgttactgattcccgtcatagctgctatgttatgaaattgtcagcgattttttgcagcagggcggacagcgttttttgttcctgtttatccagacaggccgtcagttcaatttccccctgatgaaagtcggggtacagatcttcaataacctttctgccctcatcggtaatactgacgaatacaagcctgcggtctcttttgttcgtttgtctgctgcataagcccttcttttccaaagtgttcaggacattgctcgccgtcgccgaggtaattccggatagagcggctatccttcttgtatcaagcgtttcccattcacaaaggtcatacaggatggaaaacgccgtccatgataatttgtgtgccgacagcacctctttctccatttttacacggagctgctgggcggaccgatagagtgcagctgcaatataggccgcctctttgtttcggccggatagatcggaaaaaggcctgttcggcttcttattgtctgatccggcatcgttgcgaatcgtcaatggcgtcatgctccttattattgtcagaatcattagctatgaaatgaattttaacagagaatgcgaaagatatcaaatcgcaaacagcacattcccgcagaaaaaatgtgtaagattgaggtttactttttaaaaaaagggaaagacatttgtacaacaaaaagggagatgaatatcagtgggaaagaatgaaacaatgcatatcgtatcatgtgccgatgataattatgctcgtcatttgggtgggatgttcgcttctttattgatgaatatggataaaacaaggaatgccaaattatatgtgatcgacggcggaattactgccgaaaacaaggacaagcttgaacagactgcgatgtcattcgggacgccgcttgaatttttagaagtagacgctgatcaatacaagcatgcagtcgaaagcagccatattacaaaagcggcttattaccgcatttctatccctgatttaattaaggatgagtccgtaaagcggatgatttacatcgattgcgatgcaattgtgatggaagatatttcggttttatgggacttggatatttccccggcaatagttgcggcggtagaagatgccggacagcatgaaagactgaaaaaaatgaatatcagcgacactgccaagtattttaattccggtattatgattatagatttcgaaccttggagaaaacagaatatttccaaaaaagtgattgattttatcaatgataacagctcggaggattttctcgtgtttcatgatcaggacgcgcttaacgcgatcttatatgatcaatggcatgaactgcatccgcgctggaacgcgcagacgcatattatcatgaatgagaaaacgcctcctgaactgatcgaccgtatacgttacagagaaacacgtgccgaaccggccatcgtccatttctgcggcggggacaagccttggaatacaggcacctcgcacccgtatcgtgatcattatttccgatatatgtcctttacgaaatggaacacgattgaccgcccggccatgaaccaataggcaggtgtgatgaaaacgcttgtgaagccgttgaccggctcacaagcgttttttttattatttcacccgaatcgcacgcacgcgtttttgcaggctggtcttttcggcagacggcttcaatcggctgactgccgtttgcgccgctgattttgcttttttcgtcttggttttttccgccgtttttactttgtcccttgcctgctgccggttgagtttatcttttatccagccaagccgtttttccagaacggttttttcttttcccggctggatttcgctgactgctttttgggcttttgcggtgttggcctcagaagtctttttttccgcctgcttgacgctggcctcagcagttctcaaaaggcttgagttgacagcgttcagccgcttttgcagcccttttttctctgaaccggccggtaatttgcggatggcgctttgtgcggcattgacggcggtttttttcttttgtttttcggcagtccggactttgtctcttgcgtccgtcacatttcttgccgtctgaactttattgatccgcgcctcgagagcggtttttccttttgacttggacagtttgctgactgccgtttttgcttcatcgatatctgcctgctttttcgtcttttccgcttttattacggcccgttcggcaaagctcttttgttttgtgtgatattgcgccagtccgtagccgaatcggctgtcacgtccgggagcgcccagatctttgacgttctgctgcatctgctgccggagctgtgtatttgtttcctccggatatttctgcctgagcagcgcgaacatgccggtgacgtgcggcgcggcttgagatgtgccgtcagctgtggcgtacatttgattcagatacgtgctcgtaatattagtgccgggtgcggcaaactcaatttgttttccggtcgtggaaaaagctgcgagcccgtttttttcagttgacgctgagactgccgttacgctgctgtaggcgcccggataattgacgggttttttattgccgtcgtttcctgcggcggcaacgatcacgattccttttttgtaagctttgtcaacggcgtcgtgaagacttttgctgtctgcgtttgtcccgaggctcatattgatgatgtccattttattggcgatcgaccagtcgatcgctttaagaaggcttttgagatctcccgctccttttctgtctaatgctttaaccgcatataaccggacatccggcgcgatgccgtcgatgccgtatccgtcatgtttggccgcaatgattccggcgacatgcgtcccgtgtccgttgtcatctttgtatgagggagtatagctgactgcggaatagcctccggcaatggagagatcatcatgagggtaaatgccgctgtcaatgacagccactttcaccttttttcccgtcaagccttctttccacgcctgcttaacctgagtcggttcgatatcccattgcggcagcacgtaactgctgctttgggcagctgataacgggcggatatcagaaccgcctgctgcctgaaaggatacattctcttctacatataagatgtcagggtcctgtttcaggtctttcactgtttgcgaatcggctgacacggcgactgccgggagatgctgataggtctgttccacatccgctccgctgtctatggcggattccttgccgttttgatttttgtacaccacgataacgtcccggtcatgcgtctcggcgtgcgcgggcgccgcggcggagaacaggctgatgcacaaggccgcggccattatcggtttcagggtgtgatacattgcgattccccctttttctttatatatcggcagtgcggaattctttttttcctgaggggtaaggaaaatttctgtatgcaaatgtaagcgtttccaaaatatgatggagaaaatgctttaagacatctgcgcaatgaactcaaaaagggggtttttgataaatgagtacgttcaatcgggtcatggaagaaaaaatcatgcctgtcgccggaaaagtcgccggccaaaggcacttaagagctttgcgggacggcattattttgactatgccgcttatcatcatcggatcggtttttctgattctgacgagtcttccgattcccggttatgccgattttatggctggtcttttcggtgaaaattgggttgaaaagctcgggtatcccgtgaatgcgtcctttgacattatggcgcttgtcgccgcctttgggattgcttaccggcttgcggaaagctatgaggtggatgccctgtcgtcgggagccattgcccttgccgcctttttattggcgacgccgtatcagattccgtttatccctgacggctcgtcaacagagattatggtgggaggcggcataccgatttcgctgctcggaagcaaaggtctgtttgtcgcgatgatcattgcaatgctgtctacggaagtgtaccggtttattatacaaagaaatatcgtcattaagatgcctgacggagtgccgcctgcggtcagcaaatcgttcgttgcgctcatccccggtttcattattattacgcttgtatggctggcccgtctgtttattgaaataactccttttaaaagtctccacaatgtcgtaggcgatctgctgggcaccccgctgtctattttgggcgggagtctcggcggaagtcttatcgccgaattcgtgcaaatgctgctttggtcgtgcggcatacacggcgcgtccataatcggcggcgtcatgtcgccgatctggtacggggcgatggacgccaaccgtttggcttttcaggcgggagaagcgctgccgagcatttttacgacacagttctttcaaatatggattaatgtcggcggaagcggagcgacgcttgcccttgtgctgaccatgcttgtgcgctccagaagcaaacagatgaaacagctcggccgtctcggcatcgggcccgcgatttttaacattaacgaaccgattattttcgggatgccgctcgtcatgaatccgctgttaatcgtgccttttattgttgcgccgctcttgaccattacggcgacgtacatcgggatgagcacggggatggtggcaaaaccggcgggaatcgccgtgccgtggacgatgccgccgctgatttccggttatttggcgacgggcggaaaaatctccggttcggtcatgcagctgatcaatctcctgattacatttatcatttattatccgtttttccgaatttgggatcttcaaaaatggagagaggaacgggcggcggaacaaaacgtcacagaagaaacataaaaaaaaacgggcgctttcgcccgtttttttaacgctggaaaaattcgatccattcgccgtcaggtccttcaatgtaaaagtagcggtacccgttcggaagtgtcgtgatttcttcatcaatgaatacggcgccctgacgcttcgcatgcgtgaactccgctgcgatatcttcagtcaataaagcgacatggtgcacttttccttctgcgggaagctcgctgctgtagccctggatcagctcaatttctgtctccggcccttcttgaaagccgagaaaggcaagttcaataatgccgttcgtatgagtgatacgatcctttaactgcataccgagaacgtcttggtaaaaggcgatggatgtttcaatatctttgaccataatgcctgtatggtcgattcttttggctgtcatggttttccccctgttttgaatttttcgggacaatgcggtgttgatcatgttttatggtacgataagagaaagcaaaacgaaagaggaatgcacaatgaagctacttacagtgaaagatacatttgccggaaagctgaaaaaaggattccccctgattgaaaaagacgctctgtccggaagctcggctcatttaacagagggcgatctttttgatgtgacatccgagaagggtgagtttatcggaaaaggctattacggtttgcagaataaaggagtcggctgggtgctgtcccgcgcgagagatgaacggatcgacggacgtttctttctggacaagctgaaaaaagcggctgaagcaagagcccatctgtttaacgcgcccgatacgacggcgttccggcttttcaacggtgagggcgacggcatcggcggcgtcacgattgacttttatgacggttatctgctgattcaatggtacagtaaaggcatttacgcttataaggacagcatgattgaggcgattgacggactggagctttcttataaagcgatctatgaaaagaaacgattcgatactgccgggcaatacgtggaagacgacgattttgtcaaaggcgaaagaggagattttccggtcattgttcaagaaaacggcatacggtacgcggcggatttaaacgatggggcgatgacgggcattttcttagaccagcgtcatgtacgcaaagcgattcgggacaagtatgcaaacggcagacgggtgctgaatacgttctcttatacgggggcattttccgttgcggcggcgcttggcggagctgagaaaacgacaagcgtcgatgtcgccaaccgcagtctcgcaaaaacgattgaacagttcagcgccaacggaattgattatgaggcgcatgacattaaggtcatggatgttttcaaatacttcggctatgcggagaaaaaagggctggcgtttgacctcatcatccttgatccgccttctttcgcccgcacaaaaaaacggacgttcagcgcggcgaaagattataaaaacctgctgaaggaaacgatcgccatcaccgcaaaaaacggcatcatcgtcgcttcgacaaacagcagcgccttcaatatgaagaaatttaaaggttttatagagaccgcctttaaagaaacaaatgagcgttacgacattttggaagaatacacgcttccggaagatttcaaaacgattccggcgtttaaagaagggaactatttgaaggttgttttcttgcggaaaaaataggatgatcatttatagcgtggaaagagggggaaaagaaaaccctcttccatcgctttaatacgggataaataatcttcatatcttactgtttaaagaaaaaacccgctattatttagtatctcatctgtgccaagtaaagtggcctcactaatccctccgcccaattgtatcctcgataatgattttaatgggcaccaccctttttttgagtatctatataaattgtaatggcatcactcatgagcttcgccaacccttcaccataccggtcgatgttcttagtgaagcgttcatcttcaatatagagttgacctaatccgtaaaaggcatcaaaagaatattcaccaaaattttcattgagaaaatcaaaccactctttgatagctgtttgtacgtctggggactcgggagattggttaataaggagtgcaaatttattgaacattgcagtccacttatcagataaatctttttgctcaccatcagtcatgtttttcaatctaatatttaccttatcgacaggttgatcaccccaccgtttgcgggcttcttgctcataaagattatcattaaagttaattccctcaaaccgctctttgttcgtcatgcaaatctctcccatcatatgtttgattgatttatcgatggtttcaatcatcttattgactctattccgtttctcaatcaacattttcttttgtaaaatgaatgcttcccttcggttaaatgaaggattagtaatgatttctttaatctcttttaaggagaaatcgagctccttgaaaaatagtatctgctgcagctgttcaagattctcttcagaataaagccgataaccggaatcggtcgtttcctgaggagtcaataatccaatttgatcgtaatgatggagagtgcgtatgcttactccaatcaggtcagctacttcttttactttcatacccattacgtttgccgcctccttaatggctactctaaagtattacgcaacgtaagagtcaatagttggttaaaaattttttgtatataaagggagaacatatgaggatttcattgctgaaattaaagaaaaaaaagccgggcgtgaagctccggcttttttctattcaataatgtgctgcacccggccgattcgcccgtcttcaaggcggaccttaatgccgcgcgggtggaagcttgagttcgtcaaaatatccttcacgattcctcttgtcagctttcctgaacgctgatcggctttcaggacgatatcgacttcaagtccttttctgatgctgcttcgctgctggccgttcatatgacacatccgttcttcagtcttttcacttcatgtcttatcatatcgtgttttcgtctttttatgaaggacagacaaatcaattcttcatggcaactaaaaaaagaccgctctgtaaggagcagtcttttatgacataaacgaaagcaaaatcggggccgcgcacagtgtcataatcgcggcgagaatcatggacacgcttgagatcgttcctgatacggagctgagctcaaatgctttagatgttcccgctccgtgcgcgctagttccgagcagcacgccccgggcaatttcgttatcaatgcggaaatagcggatgaccatcggcccgatgatcgttcccaataaagccgttaaaatgacgaaaaccgctgtaacggccggcatcccgccgatcatttctgaaacgttcatggcaatcggcgtcgtcacggatcgcggcacgagactgtcgactaagctgctgccgagattgaaccattttgcgataaaggctgttgacagaatggcgatacatgaaccgaccgctacgttcaaaataatttccacggcgtatttctttaaaatcgggaaatatttataaagcgggatggcgaacgccactgttgccggctgaagcatatcggtcagcagtccgccgccgagattgtatgtctgatacgggacattgacaagaagcagcagtacgaccaaaacagcgggcgtaatcagaagcggcgacgtatacacccgcggaaaacgaatgtagagttttttcgcgcccaaatatactaagacagttaagaataaacttatgattccgatgaacacgtttgttttttctcctttctttttgctatcagctgtgtaagcgtacctgttgaaaccatcacgacaaatgtgctgatgacgacgacaagtaaaatgcttacgccgaatttagacataatatctccgtattcaatcactccgacggcagacgggatgaaaaacagcagcagctcaccgaggagccatgctgcgccaagctcaatccattcaagtttgataatcttgaaatgcaataatgtgaaaagaatcacaatcccgattatactgccgggaatatttatatgaagagccgccgtgatccaattgatcagacgcgcaaatataaacagcagagcgatttgaataacggtaagcagcaattttttcataatgatgcctcccttatatttatattgtacagaaggttttgctataggtaaaatacatataaagaataatgtgtattccttttgtctatagaaaggatgaaatgtaatggatatccggcacttaacgtatttcttggaagtggcccgtttgaaaagctttacgaaggcttcacagtctctgtatgtttcacagccgacaatctcaaaaatgattaaaaacctggagacggagctcggcattaaactgttttaccgcaatggccggcaagttgaactgactgacgccggacagagcatgtatgtgcaggcgcaggaaatcacaaagtcattccaaaacctgacgtcagagctgaacgatattatggaagtgaagaaagggcacgtccgcatcggtcttccgccgatgatcgggtccggctttttcccgagagtgctcggtgacttccgcgtcacataccccgatgtgacgtttcagcttgttgaggacggctctattaaagtgcagcaaggggtggaggacggctcgcttgatatcggggtcgtcgtgcttcccgcgaatgaagagatttttcataccttcacaatcgtcaaggaaacccttatgcttgtcgtccatccgtcacatcggctcgctgacgagaaagaatgcagtcttcatgaattgaaagaagagccgttcatatttttcagggaggattttgtccttcataatcgaattatgacggaatgcgtgaaagccggattcaggccgcatgtcatttatgaaacatcacagtgggactttatcagcgaaatggtatccgccaatctcggtatcggcctgctgccggaaagaatctgtcgcggtcttgatcctgacaaagtcagaaccattccgctcgttcatccggtcattccgtggcatttagccatcatttggcggaaggaccgctatatgtcctttgccgccagagcctggctggagcatacgaaatcgtatttatggaatccgaaaaagagaaaaaaggatgattaagcatggacgcacaaaccgcagctcaacacttgagtaaagtgcgggatcaaaacccgctcgttcacagtatcaccaataatgtcgtcacgaacttcaccgctaacggactgctcgcgctcggcgcatcgcccgttatggcttatgcaattgaggaggccgccgacatggcgaaaatcgccggagcgctcgtcctgaacataggcaccctcagctcggcatcggttgaagctatgatcgcagccggaaaatcggccaatgaaaacggtgttccggtcatttttgatccggtaggcgccggcgccacgccgtttcggacggcatcagcccgcaagatcatacaggaggtccgcttgtccgttattcgcggaaatgccgcggaaattgccaatattgccggcgcccctgattggaagataaaaggcgtggatgcgggggaagccggaggagatgtggttcagctcgctaagacggctgcaagcgggctgaagacggtcattgcgattaccggaaaaaccgacgtcatctccgacggcaccgacacatacgccgtacaaaacggtgataaactgctgacgaaggtgacgggggcgggatgcctgctgacgtctgtaatcggagccttctgcgcagcggggcaggacgttctgcaagcggccgtttcagccgtttctgtatacggaagcgccgctcagcttgccgctttggacacctcccataaggggccgggcagcttccagattgagcttttaaacaagctggcaagcatctcagaacaagaagcggctgagcttgccgcaattgaaagggtgatagaaaaatgacgcgtatttctcgggaaatgatgaagaatatgttatcggtttattttattatgggatcaaacaatacaagcgcagacccggtttccgtggtgaaaaaagcaattgagggcggcgctacgctttttcaatttcgggaaaaggggagcggttctttaacaggggatgaacgtgtcctgttcgcgaagcgggtgcaggatgtctgcaggcaggccgggattcctttcatcattaatgatgatgccgaattggccttgcgccttgaggcggacggagtgcatatcggacaggatgacgcagacgccgaagaaacgagagcggcaatcggcgatatgattctcggtgtgtcagcacataacgtctccgaggtgaagcgggcggaagaagccggagccgattacgtcggaatgggcccggtctatccgaccgaaacaaaaaaagatgctgaagccgtgcagggagttacattgattgaagaggtacggcgtcagggcatcaccattccgattgtaggaatcggcggcattacggctgacaacgcggcgcccgtcattgaagcgggtgcagacggcgtcagcatgatcagtgccatcagccaagccgaagatccaaaagcggcggcgcggaagttttcagaggaaattcggcgctccaaagcagggctgtcccgatagggcggccctttttctgtgtgcgcaaaaaggcgtgacggactgggagaatagaagccgtatgtcaagaacagagcaatcaagcttgcaatatcgaccgaagcgtttgacggctctatcgcttctctcaaagtgacgcctgaaccaatcagcgcaggctcaaaagccctctataaaacagtgaatagcgcgaagtgagagaccatttcgaggtcacggaaaaacttaatgcggaattcagcgaatttgaagttttgatgtcgaaatacaaaacgtgcgatcaatgtatacgtcttgtgatacattaagtacagatcaaatcagagagataagcacgaagctgacggccctttctgaaaccatgtcgaagattgccgatgtgctttaaaaggagttaagacacagcatgagcgatgaacataacaaggaaaaacagatccacagacgggatgtcctgaagtggggcgccgtcgcgggcgcagccgtcgctgtcggagcgagcggcctcggaggactcgcgccgctcttcaaaccggcggccaccgcttcaaagaagaatgatgaaaaacgtgatcgtgatcaaatcgttcctttttacggaaagcaccaagcaggaatcacaacggcgcatcagacgtatgtgtattttgcggcgcttgatgtcatgtcaagcgacaaagccgatgtcatctcccttttcaaacaatggacaagcttgacgcagctgctgacttcaggcgccgtcccgtcaggcgaacagaaaaataaatatatgcctccgcaggataccggggagtcgcaggatctggcaccggcgaatttgaccgttaccttcggcttcggccccgggtttttcgagaaagacgggaaggaccgcttcggactgaaagataaaaaaccgaagcacctcgccgatattccgccgatgcctaacgacaagctcgataagaaacaaggcggcggtgatatcgtcatacaggtctgcgcggataatgaacaaacggcgtttcacgcggtgcgcaacctgatgaaacaggcatcgggtgtgtgtgaagtccgctttctcaataaaggtttcttaagcggcggaaaaaacggagaaacaccgcgcaacctcttcggattcaaagacggcaccggcaaccaaagcacgaaggatgaaaacctgatgaattcgatcgtttgggttcaatcaggagagccggactggatgacgggcggcacgtacatggcgtttaggaaaattaagatgtttttagatatatgggaccgttcatccttgaaggaacaagaggacacgttcgggcgggtgaaaagctcgggcgcgcctttcggacaaaaaaaggaaaccgatcccgtgaagctgaatcaaattcccgccgactcgcatgtcagcgtggcaaaatcaaccggcagacagattctgcgccgggcattttcctatacggacggaattgatccgaagacgggctatgttgacgcaggcctgttgtttatctgctttcaaaaagacccggaccgccaatttgtcccgatgctgaaggctttggcggcaaaggatgcgctgaatgaatacacacaaacgatcggctcttccttattcgcctgtcccggcggctgtaaaaaaggagaatatatcgcccaaaggctgctggaatcgtgacaccttccatatggagggtgttttttttaaaaaaaacacttgtaactataaaagttacaacttaaaatgataaggaaaggagacttacaatgacactgcagattaaagtatattctgattatgtatgtccgttttgctatgtcggcaaagcggcgtttgaagaagcaatcaaggacaaggacgtacaggtggaatggatgccgtttgaattgcgtccgagcccctcgccgaaacttgatccggtgaatgatcccgccaagcggcagatgtggaaaaactccattgagccgatggcgcagtcgttaggcgttgaaatcacgttcccccgcgtgtcaccgcatccatacacggatttggcatttgaaggctttcatttcgcaaaggaacacgggaaaggaagcgaataccatacacgcgtttttcaggcgttctttcaggaagaacaaaatatcggtgacgttggcgtgctgacaaagcttgcggaagaagccggacttgacggcgctgccttcaaagaggcgcttgagacaagagcgtacaaggacgtacagcgggaagcgctccgccatgcttatgaggaagccggcattacggcagtgccgacgtttatcatcggcgatgagagaatccctggcgcggcgggaaaggaaacctttgaacaaatcattgagcgggaactgaataaacgttaacccgaaaaaagccctctcgatcagcgagagggctttgccatatagtgtttgacaaatgtttgtctgtccgcttcatatgccgcggcgtcaaaggagtcgccgcaaaaatgaaggcaccaagggtctttctggcaggcgacgccgacttgatagccgtgtttttgaaattcgagcgactgtgatgtgtcgtaaaaatgaaagccgcgaaacaaatcctcccgccactccacgtcatattgagccgccattaacaagccgtcaatggcgtcagcgggcgtaaacaggccgtcttcatcaccgtgctcaaaatccagcgggtgataagcattcccccggtattcaatcacttttcccatccgctgtccgctttcccaccaaatgccgttcggcggcagggttttgcagccggcgacaccgagaaggccgagctcctgatgagattgaaagatatgaagcatgtcatgaaggaaatgctgatgaatgataaaagtatcctgatgcagataaattttatatttggaggggtgtttcagcgctttgttgtaggacgaggccatgcttgctgaatcgtatatcggcatgatatcaacggagtatgaagggggacggtaagctgcatgatatggctcttgcaccgggagtacagcgactcatcattcacacagacgacaaacagaaatgaatgtgaatccattacatgctcctctcggcctcaatcacatattgataggccgatgcttctgtcataaagtcatgccttatgccaagctgtacgcatacttcgtgcaatgatgcgatggctttgtggtaagaagggtgatcaacgcggatcgcctcaatgcgtttgacctcatagctggcggctttaaataatgaaagagtctcttcccgggtaaaaaaacgcaggtgggtctgatccattaatccggcgtcactgtaagtccatttgccggctaaaagctccaacacgactgagatgtggccgacattcggtatgcatgcaagcacagtgccgtctttttttacataaggacgaagctttttcagcactgtccacgggtcgacaagatgctcaagaacgtctccgaacagcatgcagtcgaattgctctgattcgtacggaagaatggcggattcaatgtcgccgcaaagcacgtggctcaatttgctttccgccttttttgcggcttcgggatacgcttcaatgccgtaaaccgttattccgcggtcttcgatcgccgctcctaaattgcccgtgccgcagccgacatcaagcactgtccgccagttttcgtctattttgttcaataaataaggattcaggccttcgtagtagttctgttgtttttcatcataatagggattcgtatccatctgtgtatcacctcataaatgggcataatacacaagatatgcagcggggggatctcatatcaccatgtttggctgttcaattgcggaatgcggacgggaatggttgtccggtatacggtttgttctctgattcccctcttattgcgggtgttcctttgaaaactcgggtgcgggcggactgtggcaggtcatatagtaaaaggatccgcctgtaatcttaccgctggcggatggtgtttttcattggtgtttttttcttcaccgctttttcagtatttaagaagcgcctcacatcgtcaatgtgcaaacccatgattctagcctcttgaattaacaattgccaatcttgatctatatctttcattacatgagttttcataagaacctccaattgaaaaattgatttgcccagctacagcagccaatgtataacaaatatcacacatagttggccggtaatcccaaattgaagatgaattcacctacctattccctaagaaaatgactgaaataaccaaaatccttcaagaattcttacatataataataaacaaataaatactgactggatagtatgcaaataaaaataaaccatatgacctattaacatttaccctcaaaacgtcgattagcatattctttttgcataaaaaataccgcaaaagaatgattcggtgtaagataaagtgaatgatcaaacagctggggtaaaaaatgaaaaaaaacaaatttcaaattaagagagaagaaacatttgaaagttttattgacgcaggccttcatctcctgattgaaagagcttacgattcagtctcaatcgatgacatcagtaaagcggcgggtttcagcaaaggggcgttttacgttcattttgaaagcaaggaagattttctgaagcatttgttagagaggcgtcagattaaaaaaaggatcatcactggctatctcgacgaattagaaaagcaaacagagcggccgttgacgctttgtgaagccgcggccagcgcggccagcctgttgatgcggtttgtaaacagcaagcctgcctggaatgttgtgtcttttgccgttcatatgcctacttacaaagtcgtcagtgaatatgaagcttatatccgcctgtataagttatggatagaagaaagcaccatgtacataaattggctcaaatcgagaaatttaatagaagaccatatagataccgagcataccgctaacatgatgtgcgcgctcatcgacggggtgattaagcaatccaatgtgctgggaaggccggttactttccgcagcatgtttgacgcgctctatgtttttgtcagcaccagaaaatcagggtaacgttcttcttgatttgacaaaaggtttagaaaagtctttcagaaagcgaggaactgccatgcgctacagagaaattatgatgtatatcattatggggatattcacgaccatcgtgaatatcgtcagtttttacattctgacgtcggcatttgagatggattacaaggcggcgactgtcgccgcttggattctgtccgttctatttgcttatgttacgaataaacggtatgtctttcagcaaaagaccgcggggatgcggagtctgatgaaagaattaacggcctttttcagcgtgcgggtactgtctctcgccatcgatctcgccatgatgattcttctggtcagtcaatttcatatgaacgaaacattggcgaaaatcgccgataacgtcattattgtagtcgtcaactatgcggccagcaagtggattgtcttcagaaaagcgaaagaagagggcgtgtcataaccgtttctttccgcgtcccggggggaaagtgtaatggtggaaggggatgcgtttgaagcgcaaaataaagaaagcgtttgctgatgtattcggggaatccgagacctgcgctttttctttgcgcccggcagagtgaatctcatcggagagctaacgggggccgctatgaggagaagacagagagaaaagctgacttttacacggcggatatcggcgccggagcgagagaactaaagggggatgacgatggcaattgagcggcacgtggaacgtttaatccagtacggattgcaaaaagagctgatttcatttcttgatattgaatatacaagaaaccgtttatatgaaactttgcatattacccatccggaggcttcagaacagaaagaaaatgaatcggcggcatcattgccggacatattggccccgatttatgaatgggcggcagaaacgggccggattgcagccgatacagacacctatcgcgacctgctgagcgcgaagatcatgggctgctttgccccgcagccgtccgagattgtgcgtcgttttgaagaaacaaaggcggtgcacgggccggagcaggcgacaaaggcgttttaccgattttcagaggatgtgtattatatccgttcggacagaatacagcggaatgtcggatggacggctgagacggcttacggaaagctggacatcacgatcaacctttcaaaaccggaaaaagatccgaaagcaattgccgctgccaaagagcagcctcaatccgattatccgggatgtgttctttgtaaagaaaatgtcgggtacgaggggagaccggatcacccggcgcgtcaaaaccttcgtgtcattccggtcattctcggcgatgagcagtggtttctgcaattttctccgtatgtgtattaccgggagcattgcatcgttttgaaagaccggcacgaaccgatgaagatcagcaaaaaaacgtttgaccggctgctgtcgttcgtcagccagtatcctcattattttctcggttccaatgctgatctgccgatcgtcggcggcagtattttaagccacgaccattttcaggggggccattatgaattcccgatggcgctggcggagacagaaagctggtacaggctgcctgactatccgaaaacggtgctgggaattgtgaagtggccgatgtcggtcatccgcctgcagagtgagtgcgcgtctgagctttccggcgcggcggatgccatcctgcgggcatggcgcggttattccgatgaggcggctgatctcctcgcctgttcaggagaaacaccgcacaatacaattacgccgattgcccggcggagaaacggtttattcgaattagatctcgtcctcagaaataaccgcacctctgatgagcatccgctgggaatttttcatccccatcaggaagttcatcacctgaaaaaagaaaatatcggactgattgaggtaatggggcttgcgattctgccgggccgccttgaacaagaaatgaaatacacggctgaagcgctgtgctcaccggacccggaggcggtcttaacggcagacccttctgcggcaaagcataaagattgggcgctcagtgtgctgcataagcggaaggtaacgaaagaaaacgcggaacagattctgaaagaggaaatcggccatgcctttgcgcggatactggagcatgccggcgtctttaaacagacagaagaaggcagagcggctttccggcggtttatccgccatttgggcgctctaccggaaaaaagccccatcccataagggacgaggcttttttttatcctctgcttctggcgatcaggctgaataagaataccacgatcgcagctccgatgattgccggaatgatggcaaagccggcaaggtgaggcccccatgtgccgagcagtccgtgcccgatccatgcgccgatcagaccggcgatcattgacccgatgattcccccgggcatactgccttttacaaataaacttccgatccagccgataataatagcgacaatcagagatacgataaaacccataaatatcacttcctattttttattatttatgcctatatgtttccttcgttttgtccatattaaacatatgaatgcgttttttataatgaacatatcaaggcgcgttccggtcttttttttcacaatgcgttgcgttaaaatggaaaccgtgtgaaaaggtgtgagcaaaggaaaaaatatttcttttgtagaatgtttaacaaaatgaaactttttgttgaccagcgatttttattatggtaaacctttatttggtattattcgttctcgctatcttttttctctatatatgctaaatgatctaaaactttttatgtttgatttacgcaagtggaaaaagctcatgcattttttgacgattttgtgacattaggtcgaaaaaaagatgaactttagaaaaaaataaagctaataagggcagattttgatagcataacaaggtagatagagaaaagattttgagaaagtacatttcagattcactacatcaataggaaggatggtgatcttcttgttcagagcatttaaaccgttacttttattagcgatgttggctgttgttttcgtactgggcggatgcagcgacatttccgttttagatccgaaaggacctgtagcagaccagcagaaagatctgattctcttgtcaatcggatttatgctgttcattgtcggcgtcgtattcgtactatttacaatcattttagtgaaataccgcgaccgcaaaggcaaagacagcggaaattacaagcccgagatgcacggcaacacgttcttagaagtagtctggacagtgatcccaattttaattgttattgcactttctgtgcctaccgtacagacgatatattcgttagaaaaagcgcctgaagcgacaaaggataaagagcctcttgttgtttatgctacttcggtagactggaaatgggtattcagctaccctgagcaggatattgagacggttaactacctgaacattcctgtagaccgtccggttttatttaaaatttcttcagcagattcaatggcatcgctatggattcctcagcttgggggacaaaaatacgcgatggcgggaatgctgatggatcaatacttacaggctgacaaagtgggaacatatgaaggccgcaacgcgaacttcaccggcgaacactttgccgaccagaaattcaacgtaaaagctgttacgcaaaaagactttaacagctgggtgaaaaaagcccaaagcgattctccaaagctgacgaaagagaagtatgacgaactgatgcttccggagaatgtcggaaaattaacgttctcttctacacacttaaaatacgttgaccacggccaagatgccgaatatgcgatggaggcgcgcaaacgccttggctacaaagccgtatcaccgcactctaaaacagacccgtgggaagatgtaaagaaaaacgaatttaaagtatccgacgataaacaagattgaaattgaacaagaaaggaggaagcccgaatgaaattgagatgggatgaattttttgtaacaggtgacccattaattctgggcgcacaagtttccattgcgctttccactatcgctatcatcgttgtactcacatacttcaaaaagtggaaatggctctggtctgaatggctgacgtctgtagaccataagaaacttggaatcatgtacattatctctgctgttatcatgctgttccgcggcggggtcgacggcttgatgatgcgcgcccagttagcgcttcctaataacagttttttagactcaaaccactataatgagatctttacgactcacggtacgatcatgattatcttcatggcgatgccgtttttaatcggtctgatcaacgttgtcgtacctttgcagatcggtgcgcgcgacgtagcattcccttacttgaacaacctgagtttctggacgttcttcgtaggtgcgatgcttttcaatatttctttcgttatcggaggttctccgaacgcaggatggacgagttacatgccgctggcaagcaacgacatgagtcccgggcctggtgagaacttctacctgctcggtcttcagattgccggtatcggtacgctgatgacgggtatcaactttatggtgacgatcctgaaaatgcgtacaaaaggcatgacgctgatgcgtatgccgatgttcacatggacgacgctgattacaatggttattatcgtattcgccttccctgttttgacagtggcattggcgctgttatcatttgaccgtttgttcggcgctcactttttcacgctggaagccggcggtatgccgatgctttgggctaacttgttctggatttggggacaccctgaagtatatatcgttatcttaccggcattcggtattttctctgaaattatttcagcgtttgcaagaaagcagttattcggttacaaagcgatggtcggctcaattatcgccatttccgtcctgagtttccttgtatggactcaccacttcttcacaatggggaacagtgcgtccgttaactctttcttctcgattacaacgatggcgatttcggttccgaccggggttaaaatctttaactggctctttacgatgtataaaggccggatcagttttacaacaccgatgctgtgggcgcttgcgttcatcccgaacttcgttgtcggcggggtaacaggggttatgcttgcgatggctgcagcggattatcaataccataatacgtacttcctcgtatctcacttccactatgtgctgatcgcgggtacggtatttgcatgtttcgcaggatttattttctggtatccgaaaatgttcggccacaagctgaacgaaagaatcggaaaatggttcttctggatctttatgatcggatttaatgtatgtttcttccctcaatacttcttggggctgcaaggtatgcctcgccgtatttacacttacggaccgaatgacggatggactgcattgaactttatttcaactgtcggagccttcatgatgggtgtcggattcttaatcctttgctacaacatctactacagcttccgctactctactcgcgagatcagcggagattcatggggcgtgggacgtacgcttgagtgggcgacttcatctgcgattccgccgcattacaactttgcggtgcttccagaagtgaaatctcaagatgcgtacctgcaattgaaagaagacaaaacggatattcatccggaaagcaagttcaagaaaatccatatgccgcacaactccggaagaccgcttattatgtcagtggcgttcggtattgctggcttcggacttgtatttgaatggttctggatgggcattgtcggcttgatcggcattctgctttgcatggtgcttcgttcatttgaatatgacaatggctactatatacctgttgaagaaataaaagagacggaaagaaagatttccgaataaaggaggcgtgatttatggaacatgcagaacacggcaattctaacgcgcctatggaatatcaatctgaaaccggcagactcaatattctcgggttttggatctttttaggggcagagattgtgttgttctcaacactatttgcaaccttcttcgttcttcaaagaagaacagcaggaggagtcttaccggctgaattatttgaagtgaagcttgtcatgatcatgacattcctgcttctgatcagcagtttcacctgcgggatcgctgttcatgaaatgcgtcgcggaagtttaaaaggcgtcgtcatttggacgatcattacgcttcttctcggtgcgggcttcgtcggatgtgagcttaacgagttcatccactatgtacatgaaggagcatctctcggtacaagtgctttctggtctggattcttcgtccttctgggaacgcacggaacgcacgtaacgatcggtatcttctggattgccggcatcttactgcaattgaagaaacgcggattaacgccgcagacgtcttcaaaaatctttatctcaagtttatactggcacttcttagacgttgtttggatcttcatctttacaggcgtctatctcatcggattggggggactataatatggcaaacaaatctgctgaacacagccactttccgtggaagcatatcgtaggttttgcgttgtctattattctgaccctgctggccctttgggttgcggtatatacggatttaagctcatcagcaaaactgtggatcattttcggattcgcatttatccaagccggtcttcagcttctcatgttcatgcacatgacagaaagcgaaaacggcgggattcaagtcggaaacacgctcttcggatttttcggagcgattgttatcatccttggttccatctggatctttgcggcgcactaccatcacggtgaccatatggatggaaaccctcctggcggtgcgaagcaacattccgaacatcaggaataaaaagaaaccctcttcgttcaggcgaagagggttttttgtgcctttattggcttcttctccggcgcaggcgcggaaggccgtaaatgataaaggcggcgatatgggcaacgatgacgttgacggcaaacaggatgatcatgagtgtgtggccgagaggggacaggctgctggttgcgtaaaagtagaagaaaacccacatgagaataattggcggtatggccgaaagagcgacttttttgttatccagccagataaagaggggtgttgcgcttgcgaccagtaaataagcaaaaaacatgtccatcttacatgtctcctttcattttatgggagcgtttccaaaatgaaatacagagaataaaatgtgtctgttttgtggtcgttttttgaacattttgttacaattattataccatgttttccaatttttgataccgctttatcgagaaatgtattgcaactattgcctcatttttggataggtacaagaaaccggaaaggtcaaataccctgtcacatttccggacaagggaatggcgcaggctgtgaacctttgctatgttcaaagaaaacatgcacagcgagggtggttttgaagtggacataacaaaagacgatgtcacagcgccggacgtcattgcgcttttgcaggagcatctgaagagcatgaccatgcattctcccccggaaagtatacacgcgctcaatgcggaccggctgcgtcagcctgacgttacgttttggagtgcgagggaaaacggcgtcctgctcggctgcggcgccttaatggagctaaacagccggcacggtgagatcaaatcaatgaaaacggctccgcatcatgtcagaaaaggcgcagccaaccggatcctccgccatatgcttgaagaagcaaggcggcggggctatcagcggatcagcttagaaaccggttctatggaggcttttctccccgccagacgcctgtatgaaaaagcagggtttcaatattgtgatccgtttgcacattataaagaggacccgaacagcttgtttatgacgttaaacatagactgaaaccccttttctgacgagaaggggttttttatcggaaaagtttcatcatgaccgaaacatttccttttctgacacgtcatatgtcgtgtagtccccaaaccgtaaaaaataaaaaggaagcaacctcatcatgttttcttgaacggtgttcatgtataataaacaatagtgacttccgatgaaaatgtaaggcgggatagaatgagtcgatataagaaacagcaaaatccctattatcagggggatttgatttttatatttggtgtgtttttaataattagtgttgcggcgatttatgcggccggacagttcgggcagtatggaggcagtgcctggatgaaacagattgtcttctatgttataggtgcgggattcatcggattattgctgtactttgatttagagcagcttgagaaactgagtctgtatgtattgattgccggcgtgctgtcgctgctccttttgcgtgtggcgccggaatccatcgcgccgatcaaaaacggagcgaagagctggtttcaaatcggcaactttaccctccagccctctgagtttacgaaaataggaattatgatgatggtcgcgtccattatatcgaaggcgggcccgaaagatcaaagatcacttcgggaagatgtcaatctgcttttgaaaattgcggcatggacggttattccaattgggatgatcgttttgcaggatgccggaacgggtgcgatctgtctgtttatcgttatggtgatggtgtttatgtcaggtgtaaactggaagctgatcaccatcatcggcggttcggccgcgcttgtgcttggcctattcttagtgcttgtaattgaatttccccatgtggcgaattcgatcggtattgcggattatcaaattaaccggattacatcgtggatgtctgactccagtgcggcaacgactcaggccgagagcgataaaagctggcaggtggatcaggccgttatggcgatcggatcgggcggcattaccggaaacggcgttcataatctgaaagtgtacgtacctgagggacagaccgactttatctttgcgattttgggtgaaagttttggatttttaggctgcgccattgcggttgtcatgtttttctttttaatttacaggcttgtggtgctgattgaccgcttgcatgcgtttaaccgatttggtgcgtttttttgcgtaggatttactgcacttatcgtgattcacaccttccagaacatcgggatgaatatcggcattatgccggttaccggtattccgctgctgtttgtcagctatggggggagctcggtgctttctacattaatcagcttcgggatcgtatataacgcaagtgtgcagctgacgaaatataaaagctacttgttcaattcttaatgtgagacggctcgtttttcgggctgtctttttttgtttagagcatttcgcttttggcatgatactctttcggatatgatatatagagaaggaggctttatatatgaacaataccatcgaaaccatacttaatcatcggtcgatccgatcatttactgacgagcttctgacagcagaagagatagatacattagtgaaaagcgcccaggcggcgtcaacgtccagttacgtgcaggcttactccatcatcggcgtaaccgataaggagaaaaagcggaagctggcggcactggccggaaaccagccttacgtcgaaaataacgggcacttgtttgtgttttgcgctgatttgtaccgccataaaaaacttgctgaggaaaaaggagaaaacattaccgagcttcttgagaatacggaaatgtttatggtcagcatcattgatgccgcacttgccgcacaaaacgtaagtgttgccgcggaatcaatgggactcggcatttgttatatcggaggcattcgaaatgaacttgatcaggtgacagaagtgcttggtacacctgaccatgtgctgccgctgttcggcttggtagtcggtcatcccgctcatccgtccggtcaaaagccgcgcctgccgaaacaagccgtatatcatgaaaacacgtacgatacgaatgaagaaaacttccgcagttatatgaaggaatatgatgaaaccatttccgattattatgataaacggacaaacggcaagcgggttgaaacgtggtctgatcaaatcctgcagttcatgaaacaaaaaccgagaacctatttaaatcaatatgtaaaagataaaggttttcaaaagaattaagaaaaaacctctcctgaccgggagaggtttttttatgtttcacgtgtaacatatttcgacaaaatggaacaaggtatataaatgtttatcatcagggatgctgataagcatacagaaagaaaaaacggcttagcagtggtacgatgttgatgaggtgacagtgatgatttcattaagtatattggatcaatctcctgtatcagaagggtgttctgcggaaagtgcactgcggaatacagtaagattggcgcaggaggcggaaaagctcggatataagaggttttgggtgtcagagcatcatttttcagagcggttggcgggctcaagccctgaagtgctgatcagccatattgcggcgaaaacgaatgacattcgggtaggatcaggcggtgtgatgcttccgcattacagcgcatataaagtggcggagaatttccgcgtgctcgaagggttgacgccgggcagaatcgatctcggattagggagagcgccgggcggaatgccgatcgcatcatgggcgctgaatgacggcgggaagcgtaatgctgatcaatatccgcagcagcttcgtgagctggcgatgtatttgcatgatgcagctgatgacaatcaccgttttccgaatctgaccgcatcaccccttattaagacggcgccggaagtctggcttctcggttcttcgggagaaagcgcgtttctgagcgcagaaatgggagcaggctatatgtttgcccattttattaatggagaaggcggagaaagcacgacagcacaatataagcgcagatttaaaccttctgcattaggtaaagaaccaaaaacggccgtggcggtgtttgtgctgtgcgcggatacggaggagaaagcggaggaactcgcggctgtcatggattatacgctgcttgcgggtgaacaggggattccgcttcacggcgtaccgtcttacgaaaccgtccgcggcaatacgtatacaccgtatgaacaaagacgaattgccgataatcggaatcggatgatcatcggaacgaagcagcaagtgaaagaacagattctggctctcagtaaagcatacggaacagaagaagtgatggctgtaaccattactcatcattttgaagataaacttcagtcataccgtctgcttcgagaagcttttgccgattaatcagaaagaaaccctgctgatgctccagcagggttgttcggttattcaatgataaaaggtttttcagtcagcacctggcttgatttccctttgttcgcggcataggccagcatataatattctcctgccggcagtgcggtgtcaccattgactttgccgttccagtcgaaatattgatagcctttatcctgctttttgtagatgccggcttggccgacaaagtcaagattactgtcatatacaaggaaggcaagctcttcggctccagccggaagataggtttcaatttggtaggttccctgcgttgtgccgtcctgtacgtcgattgacgttacgcgcggatagtccggctcttttacaatcagcagcgtcggcacttttgcgactgtttttccgccttcacgcactgtgacggttccctcataggtgcctgcctttacttttttggcattgacctttactttcgcattgacctttccggtttgatgagcggggatcacgacccggtctgtgcccgaaacggtaatgcccgtgccgttgaaagagtactcgagctgatatgattttctgatggacgattggttttcaatcgtaaaggtttcttttttcgtttcattgcctttgtctttcataaacgttccgtaagaataacttcccggggcgacaagggagtctgctttgatcgccttcatgattctgatgcttccggcgccttgcgcattatgcgggtatacgtcaccgtccgcgtccgttaaggtttccgccgtgttcataagagcggcttttatttgttccgggctccatttcggtttggcctgcttgatgacggcagctgcgccggctacatgcggggaagccatgctcgttccctgcttcgatccgtagccgtacgggtcggccggatcatgggtcggaatggtgctgacgatgtttacgccgggagcggagacgtcaggtttaatcatccacgtgtccataaccggaccgcgtgacgaaaagtctgccatttgttcagtgagcgatttagccacggataaatggaatgtcgcttttgtgccgcccgcttttaattggctgacgagtttttcgccgtcttctgatgaaagcttaaccgtcggcacggacatgcccggtacgttggcttcaatttctcccggggcattgttatacacaaccataccgatcgcgcccgcttttttggcgttgtctgctttatccacaaaggcgatgctgccccgtttgacgaccgcgacttttcctttcagatctttgccttcaaaatccttttgctcgccgatacccgcctctatgagctctgtttcttttttattcagtgcttttatgtcatcttctttgttgtaccccattactttcgctgaggaataggaaccgaaggagacggcgtactcgttcagcggcagctgtgtcgctccgacggagatagcttctctggacgctcccggagagccgacggtccaattgttcggcccgctgtttccgtttgatgtaacggccgtgacgccttctgacatcgcccagtcaagcgccgtgcttgtcgcccagtctgggttattcacagaattgccgagagaaaggttcatgacatccgctccgtcctgtacggcgcgttcaataccggcgatgacgttctccgttgttccgcttccgcccggaccgagcacacggtaggcaaggagtgtagcatccggcgctacgcctttaatcgttccgtttgccgctaccgtgcccgcgacatgggttccgtggtcagtcgacgcgcctctcggatcaccggacggcgtttcttcaggatcgtaatcgttatccacaaaatcgtatcctttatattgtccgaaatttttctttaagtcagggtgtttatattcgacaccggtgtcaataatggcaaccttgacgcctttccccgtatagccgagcttccacgcgtcatttgcccctatataaggcgcgctgtcatccatctgcggagacacggcatccttagatagggtgatgtctttatctttcagttgatcggtatgataggtgacgttcggataaaccgctttgacatcctgatcactcagcagtttcggaatttcatttgccgggagtttcatggagaagccggaaaacacttgctcatattccctgttgatttttccgtgtttaatggttttgagcgctttctttttcacttttgagcgttcgcttttcagcttgctttttgtctgtgctttgccgagttcctttgcttccgccagtgacttttccttcagctcgacgatgactgtcgtttgtttgccggtggtcatatcaatgtcaccaaatacctcagccttctcaagatcaggagtttgcggttttgaagccggcgcagcctgtgaacttgtggataaggtaaaggataagacaaaagccggaagcagataacggatgattccttttttcaatcgtgtttccccctttttctttatctaaattagaaatctagtatatatttcttgaaaattcaaaataatccttgtgacatatgactcatttatggaaattggtctgtgaataaggagggagttatacacagaatcctgtgcataactgaataaaattgtgtatatatattgttgggaacgagtgttcccatacaaaatatagatcgagtttgtggatatgtggatataccctgtgtttaagctgtgcttaaccaagggataaggtgtgtataactttttttatcggcttttccatttttcaggtcatttccatcagctttcaacaaaacttctgaaaactagtttgttttttcactcatattgtgacaaacaattcgcccggccgcgtctatcatagagtcatagggttgctagacccgctagtttttagcggagaaggatcggccgccttttccgttaaagcggagagaaaaacaggcctgcgaacaagctgtctgtcaaaaagaagcggagggatgatttgcaatgaaacgtttgctagtatctttacgggtgtggatggtctttctgatgaactggatggcgccgggtaacggaagatatccattagccgccgtgtacggaaaccaagcggcttatcataagaaagcgaagcggacggctggtgctttttcgtttgtgagccgagtccgatcggcggatttgaccgatgaaacgaaatcggcccgcggcaggctggataaaaaccgatggatgcctgtccgcaaagaattgccgaaacgggagcgcgcgggtccggcacctttacatcatatgaaaaagagggtacaatcccactaaacatatgaacgggagcgaacctcttgagaatagacaaagtattaaataacaatgcggcgttaataaaagaagacggacgggaaaagatcgtaatgggtcccggaatcgcttttcaaaagagaaaaaatgatgtgattcaaaaacataaaattgaaaaaatatttgtcgtgcacgacgaaaatgaaaagttcaaacaagtgttagaaacgcttcccgaagagcatatagaggcggctgaagatatcatcagccatgcggagggagagcttgcggcgcctttgaacgatcacatccacattgcgctggcggaccatttatcctttgcgatcgaaaggattcaaaacggccttcaggtgcacaaccgattgcttcatgaaattaaggcgctttataaaaaagaatatgaaatcggccgctgggcggttgaacacgtgaaacaaaccctcggtatatcattgcctgatgatgaggcggggtatatcgcgcttcatatccacactgccaaggcggatgccaaaagcatgtattcggcgatgaagcatacaaccatgatcaaagaaatgatcgaaaagatcgaatcctttttcgaacagaaggtggatgaagacagtatttcctatcagcgcctcgtcacgcacttacggtatgcggtcagccggttggactcaaatgaagcactccattccatggacgaggagatgctttatttcatccaaaaaaagtatccgtttgcttatcggtgtgcgcttgaactggcggcgtttttaaaaaatgaatatgatttggaactgccggaatccgaggccggctatattacgctgcatgtccagcgtctgcaaaaaaacccggaataacgcgtctgtttcgagaaacagactttttttttgaaaacatattgacgaaagcgctatcatgaaataaaatgaaagcgcattaaaaaactgaatcggcgggattgtgactggtaatgcaggcaagacctaaaatttgcgtacatgaaaaagggatcatgctgacctttttcgttggcgaattttaggtcttttttgattttagaaagggggatacatcatgaattatcaagaaacggcaaaacagcttatcaaacatatcggagggaaatcaaatatcatcagcgcgacacattgcgccacacggctcaggctcgtcattcaagatgaacagaagatcagccaggccgatattgaagagacagaaggagtaaaaggggctttcagcagctcggggcaatatcagattatattcggtaccggccttgtgaataaagtgtatgacgctttttcaaaagaagccgatttggggcgggaggatcgtgagacacatcaggacgcggcgaaaaaaaagctgaatccggccgcaagatttgcgaaaacactgtctaacatattcgttcccatcattccggctatcgtggcaagcggacttttaatggggctgctcggtatgatgaaggctttccactgggtgtctgaacaatcatcgctgtttaagcttttagacatgttttcaagcgcggcgtttatcttcctgcccgtattcatcgggttcagtgcggcgaaggaatttggcggcaatgcctatctcggtgccgtgctcgggggattatgatccatccggcgcttttgaatccgtgggggcttgcggatgcatcgcctgattttatgcaactcttcggcttcgacattgcgctgctcggctatcaagggacggtcatccccgtactgttagccgtttacattatgagcaaagtggaaaagggcacgagaaaaatggtgcctcacgcattcgacttattggtcaccccgtttgtcacggtgattgtcacaggatttatcacctttatcgcaatcggtccgcttggcagggcgatcggatcgggcattaccgtctcgctgacatatgtgtatgatcacgcgggcattgttgccggacttcttttcggcggtctttatccgcttattgtgctcaccggtgtgcatcacagctttcatgcgattgaggccggcctcatcgctgatttgggcagaaactatatccttcctatctggtcgatggcgaatgtcgctcagggcgcggcgggactggctgtatttttcctgacgaaaaaagcgaaaatgaaagaaatcgctctgcctgccgcattttccgcttttctcggcgtaaccgaaccagttattttcggtgtgaacctaaggtaccggaagccgtttatcgcgggaatgatcggcggagcgctgggaggggcctatgtcgtggtgaccggcgtcgccgccaatgcttacggtctgaccggaattccgatgattgccatcacggctccgctcggtttaggaaatcttataaactatctgatcggaatgggcatcgcctctgtctcggcgtttattgccgcttacattatgggagctaaagaaaaggaggccgtcaaatgaggacaccggatcaagagctgcgcctgcaggctgaggaagcgaaaaagaagcggcaagaaacagccgcgtcagatccataccgccagaactatcatgttatgccgccggtcgggcttttaaatgatccgaacggcgtcatccaatggaacggcgtatatcacttgttttttcaatggcagccatttcatacggggcacggcgcgaaattttgggcgcatgtgacgacgaaagatttcgttgagtggaaagaggaagaaatcgcgcttgcgccgggtgagtggtatgacaaaaacggctgttattccggaagcgccatcgaaaaagacgggcggctctgcctgatgtacacaggcaatgtccgtgacggagaaggaaatcgggaaacgtatcaatgcctcgccgtatccgaagacgggatcgtatttgaaaaaaaaggaatcgtcgtgcgtctcccaaaaggctataccgctcatttccgtgatccgaaggtttggaagaaagacggagcgtattacatggtgctcggcgcgcagacagaaaagctcaccggaagcgctgtattgttcacatcagagaacctgacggattggacgtttctcggttcgattgcgggggcggactcgggcggtctcgggtcattcggctatatgtgggaatgtcccgacctgttttctcttgacggaaccgacgtgctgctcgtatgtccgcaggggcttgaagccgacgggataaaatatcataacagccaccaggcgggctatttcctcggcaggctgcatacagagccgccagaatttaagcacggtgaatttacggagcttgacagaggatttgatttttatgcggcgcagacgctggaagatgataagggacggaggattctgttcgcgtggatgggcgttccggatcagcatgaggacaagcatccgacacatgcgtatcactggattcactgcttaacgatgccgagacagctgtcactgtccaacggcagaatcatacagcgcccgctcccggaaatgaaatcgcgccgcacggatgaacaaaagcgccgtcttcaattgaattgctcgtctgtaagcctcccggtgaaagatgcgtcccgggctgaagtgctgctggaagacattacttgcgaatccggttttgaaatctcaattcggggcgcggcccggtttatatttcatcaggaagaggggctggctgtgctggagcgcaccgctttcagcggagaagaaaaagaaaagagaagctgcgccatcagcgagctgcattccgtccagctctttctggatgcatcctccattgaattgtttttgaatgatggagaagaggtattcagcgccagatattttcctttcccgggaaatgatgacgtaaccgtcacttcggttgggaaaacggaaataaatgcctcaatttggacacttttgtagaaaatcgttcttttttcttatgtgaaacctatgccatctgtgctattcttcaaacgaaagcctatgattccaggaataaaaggagttgttttctcagttttgaaaaatcagaagatgacgccgaaatgtttacttgtcaaagctgcagagcaagtggaagataaacgggaagaatataaagaagtattgcttcagctgaatcgcatgctcaagagggctgagccgcacaatgaatggagtgatcggctgaggcatacatatgaacagatgaaggaatatgcgctgtttgtgcaatcgattgagatgtttttgcggtcatccgcgaaaaaaatgaaataatcccctcgatcatgagggggatatttattttattttccgctaagacgcatcgccgaatgtttagtcggtccgatgtattggttcagcgggaaggattctttgattgccgcagtgataaattcttttgccgcatagatggcttccttcacttcagcgcctttggccagttctgccgtcacggcggcggagaatgtgcatccggctccgtgcgtgtaaggtgtatcaatcatttcgctttctaatacttccgcggtttctccgtcatacagcacgtcgatcgctttttcatgtttcaatttgccgccgcctgtaatcaatacatatttcgcgccgagttcgtgaattttcttggccgcttctttcatgtcttccaccgtttttaattcatccataccgctcagctggcttgcttcaaacaggtttggcgtgatgacggttgccagcggcgccaattgggtgcgaagcgcttcggcatgctccggatacagcacttcgttcgctcctttgcagaccatgacaggatcaataacgacattcttcagctgtttttctttaatcgttttcgccgcaagctcgatgatctccacggtagggagcattcccgttttcatggcgtctacgccgattccgtcaacaatcgtcgccagctgtgcgcgaatcgtatcggcatcaatcggaaatacttgatgatcccagctgttctccgggtccatcgctacgatcacggtcaaagccgtcattccgtatacgtttttttcttgaaatgtttttaaatcggcctgaattcccgcgccgccgctggaatcagaaccggcaatagtaagtgctttgtgcattgacatatcaatggcctccatcagtgttttatatctcattatagttagattttctcccgatcacaatacggaaggcttggaggaatgatttgacagccgcggggatgtgcgtacaatacctacataagattactaggtaagggtgagaaaataaatgctcaacagggagcttgtaaagggaagcacggtcattctggtgctgacgctgctgaatgaacggcccatgtacgggtatgaacttgtgaaagaaatggagaaaagaagcgggaatgaactgcaaatgaaggaaggcacgctgtacccatcgcttcataagcttgaacgccaaagctatatttcttcttactgggaaaagcagaccaaagggcccgaccgaaaatattaccggatcaccgatgaaggaaaaaacattctagccgaacggacgaaggaatggaatctgttctccgctctgatggaccggatgctgaagcggggcgggcagaatggataaagacctttatgtgcacgaaatcagaaaagggctggaaggcaaggccggaagccgtgaattattaaaggaaatcgaaagccatattcatcatgccatttgtgttcatctggaaaaaggcaaaaccgaaagcgaagcgatggagcttattctgcgggaagtggggactccgtctgagattatctctgcttttcaaaaagcttcgacggtgcccgcgcggacttttatgctcttttatctgttctgcaactgcggtctttttgtgatgggggcgatgattacgatgatgcacgcgtggaggattcatcccgcagttgacgcgctgtggaaagggatttccgtgtcagtatggctgattatgatcggttatgtgctgtattggttccaaatcggctatcaagctggcaaagagttcggggctggcggcaaaaagcttgctgagcggacggtatgggcttcaatggtgccgaatctatgttttatgtttgtctttttgttcaatctggttccggctgggctgtttccttcggcggtcacaccgagttttgcggcagtatgcgccgttgtgacggtatgttttccgttttgcggcaaaataggtttttacgcaggcaggcagagacttgcctgatctttttcactatatacatagggaatctatataggggtgtttatatgagattaggttcgtggatgtacggcgcgtgcgcccaaatagccgttaccgtatttaccgtctgcggcttggttcttgccttgcccgttgtgagtctttttattatggttctgaatgggatgcaagacgctacttttgttgttttcagtattttgcttcttctattgttttatgcgctgggatggatttgggctgtttcgtttgcgcgtgagtggaaggtgaaacttttcgagctgcaggtcagctcgctcattccgctggcgggtatattatacttgtacattgacagcggggtgagtataccggaactgattcatgattggcatgaggatggatgtgcgcttgtcccgccggcttttgtctgcttgtgcacatgctatgcgatggtgttggtgcctgtttatcaatcaaaactgtggaatgccatggaggcgggcagacttaatgccaaggcggtatgcactgtttggggagaccttctgatcattctggttttgctggcggggatgacgtggatttgtttctgaatgggccgaaatcaaaaatccccctgatctctccgccgctttatgttttaatagaacatgagaaaaagcagaaggagcgggtcatgaatatatcaattgtcatagtcacgtataatcggattccggctttgtgtgagctgctggagtcgatttccaggcagaccataaagccttatgaagtgatcatcgtaaatgatgccggggaatcggtcgaacaagcgaagcagctgtacagcgatctgccgattcagattattgatttagaacagaatgccggacatgtggaagcgcggaacgcaggtgtgaaaaaagcgtggggtgattatatcatgctgtgcgatgatgatgatttcattacgccgggccatttggaaagaatgacggctgcacttgctgatgcggattttgtccattctgacgcggaaattgtgtcatttgaagaacggggcggcacgagatacccggtgtcacgaaagccgttcgcctatacggcggattttgcggatatgcgggtattttccacgtacgttccgtcaggcagcatgtacagacgttctctgcatgacacgttagggtattttgatccggatgtccataattattgggactgggacttttatttgcgcgccgcgaaacagcaccgtgtgaagcgtgttccttgcgcgagcgtcatatatgcgttttttgagggaggcggcaatcagtccgcggatctcggcggcaaacggaagcggtacttagaccggttaagcgaaaagcacgggcttggggagctcccgacgaaaaacttcgcggttcttctagaagagccggacatgaagaggcgggaggcgccgactgacattgtgtgggacggaaagcccgtccattcaagactgcacagttcataagggggacggacagtttgaaacagcttttaaaagacagctggtggaatcagctgaaagatgaatttgacaaaccgtattatcaagagctgagagagatgctgaaacaagaatacagcagccaaacgatttatcctgacagccatgatatttttaacgccttgcattatacgccctatgaggatgtaaaagcggtcattctcggacaggacccgtatcacgggccaggacaggcgcacgggcttagtttttccgttcagcccggggtcagacagccgccgtctttgaaaaatattttcatagagcttcaggacgatatcggctgccccgtaccgaaccacggatcgctcgtcagctgggcgaagcagggagtgcttttgttaaacacagtgcttacggttcgccgcggtcaggccaattcccacaaaggcaaggggtgggagcggctcactgaccgcatcattgatgtggtgaatgaaagagagaagccgattgtctttatcctgtgggggcgtcacgcgcagatgaaaaaagagcgcattgacacatcgaaacacattattattgaatcgactcatccgagcccgttttcggcaaggaacggttttttcgggagcagaccgttttcccgtacaaacgccgcccttgaaaaaatgggggagcagccgatcgattggtgcatccccgacctgccgcaataaacggttttttgaggcgcttccgcccggcggaagcgtcttttttgatgttccgggcggtatgccgtcagaaaaaataacaaactcaattctgcgatccgctcagaaatttgataaaatgcaggaagaagacaaattactgctggaggatttactcatgaacatacatatctctgctttaattcagaagatggaagaagaactgaggcaggcgaaaacggcgacccgcaccgaggaggtcaaaatgcacgcggccgccatccgctctctgtgtgatgtcgtgctcggcactcagacgcacaccgctccggcgcctgtgcagaatccgattccgaaagcggcgccgaaaccttccgcgtctccttcgacagacccgctgctgcttgaaaaaatgatgggcagcgccgggctgaaccaatatcagaaaaaagcgaaagacgaacgtgaggaagacggaaacggggattccattttcgatttttaacaggagaggttgattgacttgaaactgatactcgggggtttgcaatggacggcatttatgattgcggctgcgattgtagttcctgtcgccatcgcacaatcatttcacttgaaccatgccgattctgccgcattgattcagagcacattttttgtgcttggcgtcgctgcggtcatccaatgtctccagggacatcgtctgccgattaatgaaagcccggcaggcttatggtggggcgtatacacgatttacggcggactgacgggcacggtgtttgcgacattcggcgagacgctgcgggcgctgcagggggcgctgttattaagcgctgtctttttctttttgttcagcctttttaaagtgattgaacggctggccgtgctgtttacgccggttgtgaccggtgtgtatctgctgctgttggtcatgcagctgagtcagccgattgtgaaaggccttttgggcatcggctatttaaaaaacagcgtcgacggccttgtattcgggctcgcaatggttgtgacggcggcgatgttcatcatgtcccgatcgaatgttacgttcttaagacagtatgcgattctcctttcgcttgccggcggatggatcttattcgccgtcttcggcgctgccaaaccgattcaaataccggatcgcgtgattcagctgccggttctttttccgtttggaaaacccgtgtttgacagcggcctgatcattacgtcactcttcattaccgtgcttttgattgtcaacatgctcgcgagcatccgggttgtagaagcggcggtgaaaaaattcggcggcaccgttgggaaacggcgtgagcgtccggcagggtttgcggcttcgatcagccaccttttgagcgggctgtcagggggcattgcgcctgtgccgatttcaggggcggccggttttattgagacgacgaagcttccttcgaaaaagccgtttcttttgggaagtgtatttgtcatgatcatcagtatgatcccgctatttatgaatgcgtttgcgagtctgccctcaccggtcggctttgcggtaaacttcgtcgttttctccacgatggcgggtcttgcctttacggagtttgactcttatgagaaagcggagcaaaaacgaatccgttccattatcggtctggcgctcctcacgggggtcggcgtaatgtttgtgccggagagcgcgttatcagggatgcatccgatcctgatttcgctcttaagcaacggccttgtgctcggaacgctgctggcgatagcgattgaccgaatccagcttatcaaaaagaaaaaatccgacaatctcgtgtcatcggatgacggacgttgaattttgccgatgttgggttatgattgaattggaaactttaacgaaaaggcgggagaaaaatagatgaaagtgtttattattcttggtgcgattaacgctttattggccgtggcgctgggcgctttcggcgcgcatgggcttgaagggaaaatccccgataaatatttgcaggtgtggcacacaggcgtgcaatatcatatgtatcacgcgctcggtcttctggctgtcgcgtttttggctgaaaagctctctggcgcaggcagtgtttctgttgcgggctggctgatgtttgcgggcatcgttctgttttcaggaagcctgtacgtattgagcgtgacgcagatttccattctcggcgcgattacaccgctcggcggcgtggcgtttatcatctcttggattatgattatcgtcgcggccgtcaaatatttataaagaaaaaaagccaatcctctgtcaagtgagcgattggctttttgatttatctcggagaataagaagacatggagtacggataagtataagcgatttcctcatcaaatgtgatgtaatcaaggtaaatggtcagaagcagatagcgggtgcccgttttcggatcgctgatgatgatatggtcacgtcccgccgcctcaatcacaccgcggaaaatctttgaattccattctttgctgttttcgaatgtcatataaatcgtcgccgttttgccccggttcaaccgcagaatattttcaatgtatgactcttcaatcggcagcatgccgggaacgttttgtgacgatgatggacctgacgggatttgaaagctgccgccgccctgctgctgcggctggccggggaaccccccgccgaagccctgctggccttgctgcatcggcattgtcatttgctgctgcatcggcatcatttgtgatccttggccctgaggctgcggataaggattaggcccgagctgcggctggaatccctgcatatccattcccatccccatcccctgcatttgctgatattgattctttttcggtttcatattgttcctcctttgatgaaaacctcttgatgctgaaacctcctgacaagtatcagacagccgacagagcggctgctgtttttatctattccaccatatgagcccaaagaaagatttatgcgaaaaaagaaaatacgatccaatgtttccggatatcagagccggctttttttgtgcgcgcaatgctgacttttcacataatagtctgtatccctagcgcatcttccgcataaggaacatatgatagcggtagtttcaggtgcgaaaagggggtgacgagttgcctaaagtgtcagtgatcatgacgagctataacaaaagtgactatgtggcccgctctattaaaagtattctgtctcagacgtttacggactttgagctgttcattatggatgacaactcaaatgaagagacattggcggaaatacgtccttttctcacggatgaccgcgtccggttttatcaaagcgatgtatcgggcgtcaaagaaagaacggaaaaaacacgctacgccgccttgattaatcaggcaatagaaatggcggagggcgagtacgtgacgtatgcgaccgacgacaacacgtatgtgccggaacggcttgagaaaatggtgaaagagcttgatgaagacccggaaaaagccgtcgtgtattcaagttccaaaacctatcatctgaatcagcggaaagagacggtgaaggagacggccaggcccgccgaacggatcgtgtggaacgcgccgtgcgccattgaccattgttcggtcatgcaccggttttccgtgctggaacaggtcaaatcggcattcggttcctattgggatgaaagccccgcgttttaccgtatcggtgacgcccgttttttctggagagtgaatcatttttatccgttttacccgatttctgaggaacttgatatcaattatattaccgatcaatccatccattatcagcttttcgcggcggagaaaaacgagtttgtgaacagccttccgcagcagaccacgtgccgggagctgagggaatcattaaaaaagcttggaaaggggtgagggcttgtcggcatacttagcgaactattgggtgctgtaccggcagtatattgacctttttcagtcacttcgctacaaagacatcccgctcgcattgatcagtaatttttatcaatatatcagtccggcgcttcgggagagcatggagcagaacccggagcttttcggtccggcggatcagcatattcctgaagccggtattcagccttattatgatcaaaaaaggcaaaacattaagaaaacagatgagaaaccggtaaacggaaaagtcattctgcatttcgatcatcttcggttcaccgagggaaattaccggcagtttgatccggcaaaaacagcggtactggccagatggagtctgcctgaccatcatgggctgcccgttatctgcaaattggagctgacgggaatggggcaaaaagggaaccccgtcccttatattgaaaaagcccattccattttgaaagagcttcacagccatcccgctttcggaaacagagaatttcaggaacgactgtataaagacatcccgttatttattgaagcgattgacgccgttgatattttgtttacggccgagaagatttccgccgttgtagtcggcacgacggaggatatttacagccgtgtgctggcgctgatgtccgcgaaaaaaaacgccgtcagcatctgtcttcagcacggggcgctcatgggagatgaagcgtttctgcccgtatttacggactatcaggctgtattcggggcttatgaagcggagtggtataaagcaaaaggctgcagggaggaacaaatcatcatcacggggcatccccgtttcgacgagattttctcaagagagccgatagatcgggacacgttttaccgcaaactttcttttctcccgtcacagcggacggtgctgatcgccacgcagccgttttctgatgaattttatacgggagtgcttgaagagcttgccggccaaaagaacatgcagctcattattaaaccgcatccgtgggaaatcggcaaaaacaagctggatgcttacaatcaggtgctgcggaaatataaagcaggcaaaatcatcaaaaaagagatggagctgtatgatattctcccgtttgttgacgctgcggtgacacagacatcaacggtcggtcttgaagcgatgctgtttcaaaagcccgtgctgatcggaaaatcagcgggaacccgccgatacccttattatcattcacttggagaatttgtttttgaggacccgcaggcactcgctcaggaattaatccggatatgcgaaagccccgcagaatatcaaaaagcggaacaggcgcgccgtgcttttgtcgccgcgaactacccggttcaggattcgcttgccgctttatgtcaagtgcttcaggaaaaaaccggagtcagcttcagacgggttgacccttcataaaaaagataggagcgcaaaaaaaatggtgcaaaaaagatcagcttttcttccctattcattgcccatgatcgggaaggacgaaattcaggaggttattgatacacttgaatcgggctggctttcaaagggaccgaaagtagaggcgtttgaaaaagcctttgccgcctggacgggggcaaagcatgcgatcgcgctgaactcatgtaccgccgctttgtttttggccctgaaagcgaaagggatcggtcccggcgacgaggtcatcacgtctgccgtgacgttcagttcaacagccaatacaatcgtgcacacaggcgccgttccggtgtttgctgacatcgatccgcttacgctgaatgcagaccctgaaaaaattgaggcggccgtcaccccgcggacaaaagcgattgtacccgttcatttcgccgggcagtcgtgtgatatggatcaaattttggccattgccgaaaagcatcagttatttgtcttagaggatgccgcacatgccgtgtataccacttataaacagaaaatgatcggatcaatcggtgatgcgacggcattcagcttctacgcgacaaaaaacctggcaaccggtgaaggcggcatgctgacgacggacgatgacgggcttgccgatcagatcagggtgctcagccttcacggcatgagcaaaggcgcgtggaaccgctattcttcaaacggaagctggtactacgaggtcgaaacgcccggctataaaatgaatatgtttgatcttcaggcagcgcttgggcttcatcagctgaaacggattgacagcatgcagcaaagaagggctgaaattgctagccgctaccaggacgctttcagagacatgaaagggctcaccgtcccatatgtcagtgatgacgggcggcatgcatggcatctgtatgttcttcaaatagaggagcaggaggccgggatcagccggaacgatctgatttccgctttgaaagaccaatataatatcggcacaagtgttcattttattccggttccgttccatccgtattatcaaaaaacgtacggatataaggaaactgattttccggccgcggccgcgtattatcaccgcaccgtatcactccctctttatccgtcaatgacagatgatgacgttgaatacgtcattgcagccgttacggatatcgtcaaaggggctgattaggtgtacagactgagagaaaatcttgcacaggacatgattcatgccttcctgcatcagaagggcattcagcccgaagcctatgaatcgtcgctctgtttattggaagaaaacagccttcaaggcgtgattttatatgaaaactcttcgtgggaaagtcaattgttccgaaaaaatatcatcaatgtgaagcttgcagccgcaaacagcaccggacagctcaaaaggctgtttcaggaattttacgcggcaaggcgggcggacggcactgattttatatttattaaaataccagctgaagatatcggcgcgatgcaggtcgtgcagtcgcttccgaacgcttattttgtagggagtcttctcaagctcgtcagtccggtgcgtgtatataacagcacgccgccgtttgagattacagaagccggacccggcgacacggaagcgatcagccggctggcccgcgacgcctttacaaaaagcaggtattatcaggacccccatctcagctataaaagtgcaaaccgtctgtttgaagagtgggcgcggaataacgcggaaggcagagcttcgttacaattcctcgccaaatataagggagagaccgcgggctttgttcaggggctgtctaaaggcgatgaattcgtccttgatctgatggcggtaaagccgggatttgaaggaaaaggagcgggattccatttagctgcgcacgtgattgaacaatcattgcgctttcagcataagactgtatcagcgggaacgcagctccacaatgtaagagccatccgcctgtatgaaagaatgggatttaaagcggatgcgtccttttactactatcatgtgtggcccgggaaggaggcggactgatggcatcatgcaaaatcggaacgaagtcaatcggcgaaggttcgcccgtattcatcatcgccgaagccggaattaatcatgacggaaaactgagccaggcgtttgaattgatagatgcggccagtgaggccggcgcggatgcggtcaagttccaaatgtttcaggctgacaaaatgtatcagaaagaccccggcttatacaaaaccgctgcgggaaaaaacgtctctattttttctttggtgcaatcaatggaaatgcccgctgagtggatcgaaccgctgcttgaatattgtaagaaaaaaggcgtgctgtttttaagcacggtatgtgacgaaggctctgccgacttactgtatgcgacttccccttcagcttttaaaatcgcctcctacgagctgaaccatctgccgttattgaaatatgtcgcggggctgaagaccccgattatcttttccaccgcgggcgctgatatttcagatattcaggaggcttatcaaaccattaccggcgaggggaacaaagaaattgcgatcatgcattgtgtggcgaaatatcccgcgccgcctgaatacagcaatctgagcgtcattcccatgcttgccgccgcattcccggatgctgtgatcggtttctccgatcacagcgcccatccgtatgatgtgccgtgcgcggctgtcaggctcggagcgaaactgattgaaaagcattttacgatcgataaaaacctgcccggtgctgatcactccttcgccctcaatccggatgaattaaaagaaatggttgcggcgatccgctcagttgaagcggagctgcggcaggggcatcacgctccggtgccggaagtgctgtcgggaagctcccataaaacgacgacaccgattgaaggggatatcagaaggtttgcttacagaggcattttttcaacagcgccgattcaaaaaggcgaatattttacggcggaaaaccttgccgtccttcgtcccggccaaaaaccgcaggggcttcacccgagatattttgagcttttaactgacggcgcgcgtgcggtcagggatatccccgccgacacgggcatcacttgggatgaccttttgacgaaaggcagcccatatgatgactgacattttgtttatcattcaggcgcggatgggaagcgggcgtcttcccggcaaagtgctgaaaccgatcggcgggtatacgatcctcgatatgattgtcaaaagggttcgtcaaagtgcgttttacgatcaatcacgggataatctgatcgtcgccgcgtctgacagcaagaccgacgacattctgtctgcgcactgcctcagcaaccgctaccgtgtccaccgcggcagcgaacagcgtgtgcttgaccggtttgcacaagtcatcgaacaagtaaaaccggacatcgcagtcagactgacgggggataacccgtttgtcgacccttcgctgcttgattttctgattcaatcgcatttagatcagcacgcagactacacgtatatctgcggtacaccgctcgggatcggcggcgaggcggtgaacgcgcgccttttaacggagatcaatgcggacaaaacgctggcggacaaatatcaggagcatgtcacccttttgataagagaatcccctgagaggtaccggcttctctttcctgagcccccgcaggaactccgggctcctcacttgcggatgaccgtcgatacagaagaggactacaggctggcccgcgagctgtacgtaaaagcgggctcgcgtcctgatattccggcaaaagaattgatccatctgctgaatcgtgatccggagctcagggccattaatcaaatgatccggcaaaaagaggctgattagcgtgcgggttttgattttcgcggacgggggccgtgacatcggcatggggcacgcggttcggatgaagctgcttgccggtgccattaagaacaactgctcaataacgttctacacaaataaagaggcttcttcttatctatcatctgatcaatgggaagtgatcatcaagcctgacaagggacagaaggaatttattgtccgggaaataaacacgcgggctcccgaccttctcatattcgatctgctcgatatgccgtgtgactggctggaggaaatcaaaaagcattcatcggctcgtatcgtcttatttgaagaaaagagggaacatgtcattcatttatgcgatgccgttataaacggcatttacggcgggctgaaaagccggacggttcaaatgggcagcgccgcggtatatgaaggcccggattatatgattcttcatccgggttttgaaaaagcaaagcagctctatcagctgagaaaagaatgccgaaccatattggtctctttaggaggaagcgacccgaagaagcttgtctttaaagtgatggaagcatgccgccgcatccctgatattcagcggaaacgagtgatcatcgtcatgggcggcgcggcgcctcatgctgatgacgtgcgcgcgcatctcacacaaatgccttatgccgagatggtaaggcagacaaatgacatggccgcgcttctcacgagggctgatatggccatcgtgtccggcgggatcaccttatatgagaccatttgtacaggtgtgccctgcatcgttctttctcaagtggagcatcaaactgagacggcggaaaaattcgccgcacgagaggccgccgttcatctcggcctgggagaacacaccgcggcggacgtgctcgctcggcatatgtctgagctggctgctgattatccgagacggctcgggcttcatcagaacggaaagccgctggttgacggcaggggcattaaacgggcggcggcgattctttatgatttgtgataaaaccacacgtaaggaagtgttcatgtgaaaggtgttatcttagccggaggcaccggctcacgccttatgccgctgacaaaagcggtcaataagcatttactccctgtcggtccatatccgatgatttactggtcgatcatgaagctggaagaagcggggattacggatatcttgctgattacgcaaaaagaatatattccgcaatttcataaacttctcgaaaccggagaagagctcggcgtctcaatcacatatcaggttcagccagccgcatccggcatttccgacggtttatcatacgcaaagcggtttaccgggcgcgatccgttcgttctgcttttgggagataatatttttgaagattcattaaaaccttatacggagcgtttcgcaaagcagggaaaaggagcgaaagtgctgctgaaagaagttgacgatccggagcgcttcggcatcgccgagattgatgaggaaaacaaacggatcaagtcgatcattgaaaagccggagcagccgccgaccagactatgcgtcacggggatctacatgtacgacgcagaagtgttttcttatattgaacaaatttctccttcaaaacgcggcgaactggaaattacggatgtcaataatttatacattgaacacagtgagctgacgtatgatgtgttaacgggctggtgggtggatgcgggcacgcatgaatcgctctatctcgccggaagcctggcgcatcaggcattacagaaaggacaggagcattaatcatgccaaaatcatatttaattacagggggcgccggatttatcggccttaccttcacaaagatgatgctgaaagaaacagatgcgcagattaccgtcctggataatctcacgtatgcaagcaggccgcttgaaatagaagccttaaaaaagaacggccgtttccgttttatcaaaggtgacatttctgaaaaagaggacattgacaaagtcttttcccaaatgtatgacgctgtcattcattttgcggctgaatcccatgtggacagaagcataaatcaggcagagccgttcatcacaacaaatgtgatgggcacataccgactggccgacgcggtgttacagggaaaagccggcaggctgattcacatttccacagatgaggtgtacggagatttggcgccggatgatcccgcttttacagagacgacgccgctttctccgaacaatccgtattccgccagcaaggcaagctcagacctgcttgtcatgtcttatgtgaaaacccataagcttcctgccatcattacgagatgcagcaacaattacgggccgtaccagcaccacgagaaaatgattccgaccattatcaggcatgccgtaaacggcacgccggttccgctgtacggcgacgggatgcagatcagagactggctgtttgccgaagatcattgccgcgccattaagctcgtgctggaaaaaggaacactaggcgaaatttacaatatcggcggaggaaatgaacggacgaataaagagcttgcgtcatttatcatgaaggagctcggtgtcgaggaacggtttgctcatgtcgaagacagaaaagggcatgaccgccgttacgccatcaatgcttcaaagctgaaaaatgagctgggatggcggcaggacgtcacatttgaagaaggaatgagaagaaccattcgctggtatacagacagccaagactaatcggaaagaaggggatccgattgacgaaggtattagtaaccggagcggccggtcagctggggcgggagttatgccgccagctgaagcgggaagggtatgaagtgatcgccttgacaaaagcgatgatgaacatatccgaccagcgttcggtgcggcactcgttcagccattacaagccggatatcgtcgtcaatacggcggcatacacctccgttgacaaatgtgaaacggagctcgacaaagcgtatttaataaacggaatcggcgcttattatgccgcgcttgaggctgaaaacaccggcgcgaaattcattcacatcagcaccgattacgtcttcagcggcaaaggaacacggccataccagaccgatgatcccgcagatccgggcacgatttacggaaaaagcaaaaaactcggcgaagaactgatccggttaacgggaaaaaaccacaccattatcagaacgtcgtgggtgtacggcagcggcgggcacaactttgtcaatacgatgctgaaacttgcggatacacatgatcaggttcgtgtcgttaacgatcaagtcggagcgccgacgtacacaaaggatttagccgaaacggtgatcggtctgtttgacaggccgccgggcttgtaccacgccgcaaacagcggagtgtgcagctggtatgaatttgccaaggctatttttgaagaaagcggcagaaccgccgccgtgctgcccgtcacgacggaggaatacggaaatgagacgccgcgccccgcttactcggtgttgagtcttgagtcgattgaacggcaggggctcggcatgaggcattggcgggaagcgctaaaggattatttacaaagggagggacagtgcaagtgatcgaaggcgtaaaaattaaaaagctgatcaaacacagcgatgaccggggttttttctcagaactcgtccgtgacgatgaacatctcttagagcgtttcgggcaggcttcctggtccaaaagctatcccggcgtcattaaagcgtttcactatcatgagaaacaggatgacctgtggtttttcccgacgggccacgcccaggtcgtgctgcatgaccttcgcgaagagtcggcaaccaagggagaaacggatgtctactacatgggagaagacaatccgatgctccttctcattcccaaaggcgtcgcacacgggtacagagtgctgggcgaaaccccgctgaccattatttatttcacgacaatgtcctacaatccggatcagcctgacgaaaaaagaatcccgtggaatgatgagagcatcggatttgactggcagacggctcatcggtagcgcacaagacgaagacagcggatgtcttcgttttttgtgctggttcatctcgtgaaaaataaatgattgaatattccaaaaaataatttacttccatggataaaggtggtagattattctcaggaaaagagaaacccaattcgcgaatggaatcatcagacacgcttttccggcagaggacgctctgaatcctatatgatctggaggaattcatgatgttaaaaagaaaatcattttctgcctttctcatcagtgctgcggtattttcagctgtgttcttgccatcttttcatgcgaacgcccaatctgccgttattgaagcgaaaaccgtcaatagtacgaaagaatacgcgacgtctgatattgaagtcacatacaagccgaatgcgctgcttgccgtcggcgccgttgaatttcaatttcctgacgggttcaacgccactgtgagggactctgtaaacggaagaacactgaaagaaacgcaaattctcaactacggaaaaacggtcagacttccgcttacccttgacttattgggcgcgtctgaatacaatctcgtcctggtgcgtaaaaaccttccgcgcgcgggcacgtatacaattaaaggcgattacgtaaacggtttgggggccggcagtctctacgccgaaacaaagctggttattgacccgcgttaatccgggatgaaagaggctgacaacagcctctttttttatgcgcaaaatcctggcatgaatcttgcatataaaaaggggtgtaacgacaatgtgaaagggattgatgggttttggtgtaaaagcgcttacatttcgttctgccggtaattgaagcttacacgtaaaatacgatgaggtgataaaacatgtcagccaacccgctttctaaaagcactcagaaagatgaagaaaaagaagttcttaatttgttcttgtccacacaatcgatcataaaagaagccctgcgcaaactgggctatcctgacaatatgtatgaactgatgaaagagccgatgcggcttttgaccgtacgcatccccgtcaaaatggacaatggctcagtacaggttttcacgggctaccgctcacagcataatgacgcagtcggcccgacaaaagggggcgtgcggtttcacccggaagtcagtgaagaagaggttaaggcgctttccatctggatgactttaaaatgcggcatcacaaatcttccttacgggggcggaaaaggcggcatcatctgtgatccgcggacgatgtcattcggagagctggaacggctgagccgcggatatgtgcgcgcgatcagccagatcgtcggcccgacaaaggatattccggctcccgacgtatataccaactcgcagattatggcatggatgatggacgaatacagccgcctgagagaatttgattcaccgggattcattacgggcaaaccgattgttctcggcggttcacaggggcgggagacggcgaccgcgcaaggtgtcacgatttgtattgaggaagccgttaagaaaaaagggattccgttggaaaatgcgcggatcatcattcaggggttcggaaacgcggggagctttctcgctaaatttatgcatgacgccggcgccaaggtgatcggcatctcagacgcccacggggctttgtatgaccctgacggccttgacattgattacctgctggataagcgggacagcttcggcacggtgacgaatctcttctctgatgtcataacgaaccgggagctgctggaaaaggactgtgatattctcgtgcctgccgcaatctccaatcagataacggctgaaaacgcccatcacattaaagcctcaatcattgtggaggcggcgaacggcccgacaacgatagacgccacgaaaatcctgaatgaaagaggcgtgcttctcgtgccggacattttggcaagtgccggcggcgtgacggtgtcttattttgaatgggtgcaaaataatcaaggcttttactggtctgaggaagaagtcgccggaaaactgcgcagcgtcatggtgaattcgtttgaatccatttatcagacagcgcatacccacaaagtcgatatgcgtttggccgcctatatgacgggcatcagaaagtcggctgaagcggcccggttccgcggctgggtataagtgttatccgcaaagagattttgcatcagttatatagcggatcgcaaaatttctttgcgttttcagattgcagctgacaggttcggacaagcttcgtccgctttcggcaaagattttcctatttttatcacaaattgctatgctggtatgcttcttgcatcttcattaagcgtgagcacacattacaaaatacggggaggaattctaatgacagtttcatacgcacacgaaccatttacaaattttcaggaagagacaaataaacaatcgtttcaggaagcgctggcttatgtgaattcacagctcggcaagcattatccgcttatcatcaacggtgaagcgattgaaacggataaaaagatcatttccgtcaatccggcagataaaaaagaagtgatcggttctgtatcggcagccggaaaagaacttgcggaaaaggccatgcaggctgcgctgcaggcatttcaaacatggaaaaaagtacggccggaacaccgcgcgaatgtgctgtttaaggcggcggcgatcatccgcagaagaaagcacgaattctccgcgtacctggtgaaagaagcggggaaaccgtggaaggaagcggatgcggatacggcggaagcgatcgactttttagagtattacgcccgtcagatgctgaagctgaaagacggttctcctgtaaagagccgtgacggagaatataatcagtatcactatgagccgcttggggtgggaattgtcatttctccattcaacttcccgcttgcgattatggccggaacggcggcagccgccatcgtaacaggcaacacgatactgctgaaaccggcggatgcggcgcctgtcgtggcggcgaaattcgtagaagtgatgaaagaagcgggcctgccggacggcgtgctccaattcataccgggcgacggaggagaaatcggcgactatctcgttgagcatccgaagacgagatttgtgtcgtttacaggctcccgcgcggtcggatgccgcatctatgaacgcgccgcaaaagtacagccgggccaaaagtggctgaaacgggtcattgccgaaatgggagggaaagatacggtgcttgtagacagagatgctgatcttgatcttgccgcttcctcaatcgtgtattccgccttcggattctcaggccaaaaatgttcagccggttcgcgcgcggtcattcatcaggacgtctatgatgaagttgttgaaaaagccgtcgctttaacaaaatcactcaccgtcggaagtccggaagattttgatacatacatggggccagtcatccacgaagcatcttataataaagtcatgagttatatcgaaatcggcaaaacagaaggaaaactcctgacgggaggcgaaggtgatgattcaaaaggatactttattcagccgaccatttttgcggatgttgatgaaaacgcccgcctgatgcaggaggaaattttcgggccggtcgttgcgatctcaaaagcccgtgatttcgaccatatgcttgagattgccaataataccgattacggactgacgggcgctctgttatcgaaaacccgcgcgcacattgaacgcgcccgcgaagattttcacgtgggaaatctatacttcaaccgcggctgtacgggagcgattgtcggataccagccgttcggcggcttcaatatgtcaggaaccgattcaaaagccggaggacctgactatctgattcttcatatgcaggcaaaaacaacgtctgaagcctattaatctttcggaaatagcgcgatgaaaaagagagtcgcgctattttctctatatgagggtaagggggatggaacatgtatcagcagctcagcaaaatgcttccggaggagaaaatagaagccattacgaaatcactggtggcgttaaacagcatcaacggcacattgggagaaggaaaaaaagccgactatatcaaagatatgatcaagagctttccctactttcaggagaatccgtcacatgtgtgggagcaggcgattcctgaggacccttacggccgcaaaaatattttcgcatttattgagggaaacggcgaaagcctgaatacggtcatttatcacgctcatcttgatacggtcggcatcgaggatttcggccctttaaaagatatcgcttttgattccgaccgtctcgcggaatatttctcaaactatgaatttgatcgggatgtgcagcgggacgcccgctcaggcgagtggatgttcggaaggggttcggttgatatgcagagcggtattgccgttcatctcgccaatctgcttcacttttctgaacggcgcgatcagctgccgggccatattctgttcatggcaaacccggatgaagaaagccagcattccggcattttaaccagcatttctgaattaaaacggctgaaacaagaaaagcagcttcgttatttagcagcgattaataacgattttatcacgccgctgtatgagggtgacacgacaaggtacatatacacgggcgcggcagggaagcttttgccttgctttgcgatttacgggcgggaggtgcatgtcggagatacgctgtccggcatcgatccgaatttgatcgcgtcagaaatcaccagaagaattcacaacaatattcatatggcggaaaacattgaaggggagcttgtgcttccgccgacctgcctctaccagcgtgacaataaggaagcgtataacgtgcagaccgccgtcagcagctatgtctattttaattattttatttacgagaaaaccgccaaagaagtcatggatcagctgaccgccgtggctgacgaagcctgcaaagagacagaacaaaaattatctgattattacgacgaatactgtgagagaacgagcctgccgaaaaaagagatgtcatggaacgttcaagtgtacagtctggaagattacctgaaaaggctgagaagccgcgggatagaccctgcacagtgtatcgggcaggcatttaaaacatatgaacatcttgaactgcggatgagatgttttaaagccgtcgaagaactgcaaaaactcgatcctgagcagggagccaaggtcattattttctatgcgccgccttaccttccgcacaattatctgaaggaagaaagcacacgggaccggcttttgcagcatgtcattcaagaagcggtcgataaaacagcggcatcaaccggagaaacattcgtctttaaaaagtttttcccttatttggcggacggaagctttttatcgctgcatgaaacagatgaggaggtctccgcctttaccgataattttccgggctgggatgtcatcgggacgattccttttaatgaaatcagggaattgaatattccgtcggtcaatataggggtatacggaaaggacggccataaatggacggaacgcgtgtacaaaccgtacacattccatgtgctgccggaactcattcagcagacgacaatgcaccttttgcacagctgccgattagacatacgcacaaatggctgacataacggaataaggggatgtatatgcagggagataccaatcaaaatgaattgcagcgcacgatgaagggccggcatttgtttatgatcgccctcggcggcgtgatcgggacggggctttttctgggctccggttttacgatcagtgaagcgggaccgatcggcgcgatattggcttatgtgatcggcggatttttaatgtacctggtgatgctttgtttgggggagctcgcggttgccatgccggtcgcaggatcatttcaggcgtatgccgcaaagtttctcgggccgtcgacgggatttacgatcggatggatgtacgcattcagctgggccaatacagtggggcttgagctgacgtcggcggggattttaatgcagcgatggtttccggccgttccgatttgggtgtggtgcctggtatttggcgtcgtcattttttccattaacgcgctgtctgcgcggagttttgcggaaatggaattttggttttccagcattaaggtcatggccattgtattgtttattattctcggctgcgctgcggtattcggctttgtcggttttaacggcgggcagacggctccgtatctgtcaaactttacgacggacaaagggctttttccgaacggcgcccaagccgtgctgtttacccttgttatggtgaatttttcattccagggtaccgaactggtcggaatcgcctcgggagaaagcgaaaatccggaaaagacgcttccccgctcgatccgaaacgtcatatggcggacgctttttttcttcgtgctggcgatgtttgttctcgtgtccattttgccgtatcaaacggcaggcgtcatcgaaagcccgtttgtggctgtgctggataaaatcggcgttccttatgcggctgatatcatgaactttgtcattctgaccgccatgctgtcggtggcgaattccgggctgtacgcttcgtccagaatgatgtggtccctgtcaaaaactaagatgggccccgcttccttaacgaaactgacgaaaaaaggcgtgcctctgaaagctcttttcatcaccatcgccatctccggtttatccctgctgacaagtgtagtcgcggctgaaacggtgtatgtgtggctcatttccatctccggtatgattaccgtcgtcgcgtggatgtcaatctgcgcttcacaattcgttttccggagacgctttctcgctgaaggaggaaatctgaaggacctggcatttaaaacgcctctttatccgatcgtgccgattctcggattttcggtttacggtcttatcttaatcagtctcatctttatccccgaccagcgtatcggtctgtactgcggtgtcccgctgatgatcatctgttacgcgtattatcacttcggtatcaaaaaacgcctgaagcgtgagccggcttcttcggaaaaaggcgctgccggataagaaaaaaagcccttcgcttaaagcggcgggctttactttgtgtttcgtttggccgacagaacataggatagaacggcacagaactgaaaaccgaaaatgctgacggccatcggccaggcattttcttctccggcaataccgacaaggggagcggcagccgcaccgccgataaagggcaggagtccgagaagagccgcagcgcttcccgcgcctttctcctgtttctgcatagccaaagaaaatcccgtcgtcgtgacgatcccgacagaagaaacaatgatgaataaagaaatgcagactgccgccaggcctaaaccaaacgcaagtgataaaagcaaagcgatgctcccgatgacggcaatcatcagaccggagacaaacagcttccgttcatcatgtgttttggccatccgtccggtgatttgggtggcgcatatgattcccgcaccgtttacggcgaacagcaggctgaacatttgggccgatacgccgtagatgttttgcagtataaacggcgacccggcaatatatgcgaacatgccggtcatcacaaatgcctggctgagcgcaaatcccataaacatccggtcgccaagcaggccgcgaaacgtcatcagcgtctcccggagtccgccgcttgtccgcttttccggcgggagtgattcaggcaacaccgtaagcacggcggcagaaatgatacagccgattaccgccagcacgataaatacgattttccagccggcgaactgaaggataaatccccctgtaatcggcgctaaaatcggcgccgccccattgacgagcatcagtaatgagaaaaaagccgtcaattcttttccggaatacatatcgcgtgcggaagcccgtgcgatgacgattccggccgccccggtgaaaccttgaataaacctcatgacaattaaaaacgaaacagaagggctgaaggcgcataataaagaagacagcgtataaagcagcaatgacagaatcagcggcttccggcgcccgatcatatcactgagcggcccgacaacgatctgcccgacagccagacccaaaagacaaaacgtcaggctcagctgcgcaagtgacgctgtcgtatgaagatcggccgccacttcaggcaaagcgggcagatacatatcgagcgaaagcggcccgaatgaagcgagcgtcccgagaatcagtaccatgccgaggcctgcgcgggcggcctttgaatcagcgttattcatttcatgacccccaccttaacaaatgattctatcactatagcataaccagacggcgtattttatatcatttattgaatataaactaaatattttatttaaaaatctgaatgtaaataaaaaatcagaattagttttcatgtgaaatgtaaaatgaaatataaggatgctaaactataaaacaacaaaagatagaaaagttttacggaagaggtgttcaaagagcatgaacagcaaacaaaccgatcacatcgaaacgaaacgccgatttccggtctgtctcgcgcttgctttgacattaggcgtatttgccgcgggttctgaagagctggtgatttctccgctgcttccggatttagcgcgggctttcagctcggatgtcagtgtgctggcgctttccatcagtatttacggagtgatgatttttatcggggcgccgcttctcgttccgctgggagataaatattcccgggaactcagtctgctggcgggactgcttatatttacggccggcacggtgatctgcgcgctggcgcacaatctctttttcttctttctgggcagggcgctttccgggcttgcggcgggtgcgtttgtgccgacagcatatgcggtggtcggcgaccgtgtgccttatgcgtaccgcggcaaggtgatgggtctgatcgtgtcaagctggtcgctcgctttgattttcggcgttccgatcggctcttttatcggcggcgttttgaattggcggtggacgttttggattttcgccctcatgtctgtcctcgttgcttcgctcattttcattgaggcgcgccgcagcacggcggatgggaataaaacagaagaggaaaacggacggcaggcaggcactttccgggatgcgctgaaggtgccccgtgtccctgtatatctcacgatcactttttgcaacatgatcggtttttacggcatgtattcctttctcggcacatatcttcaccgcgtgctgccgggtgggaatacagcttcagggctgctgatcatggtgtacggaatcggtttttccatgagcgtgttcaccggaaaaatcgcagataaggcggggaaaatgcgctctttgatcgcggcattggccgtgatcagcatatggctttcctgtctcgcctatgcgccgtcatcaatgccgtttttggtcatcgggttattcgtctggggattgatgcaaagcctgacggtgaccttgctcagcactattttaagtgattgctcacagagccgccggggcaaaatcatggcattttacagtctggcgtccaatttggccgtcaccttgggttctgctgtcatgggtccggtctatgtcggatatggatatgcagctgtcggatttatctgtgcggccgtcaccctcatcggctttgtcctcagcgttttcgcatacagaaggtatggaaaatatgagcataagaccgaccaatcattgtatcggtaaaataaagtttctataattttgtaaatgtaaatttttaacaccttatattataaggtgttttctaatatataggaataattatcaatattttcaaataatattgacagcttgaacgtctatggataatatttacttaaaatttaacagattggttggtgctcatgattatattggataatagcattcaaacaaaaagcaaggcttattcaatatctaaactgattacgatcaacacgctcggtcctgaagggacaagcagtgagtacgcagcaaaaaacttcatcaccaatttcacccttctccaaggggtgaacagcaaattatcattgcatgatacatttgaatcgtgcattgaaaaaacgcttcaaagtccgctggaatacacaattgtgcctcacgcgtatgacggcattaagcacttctacatgagaccggatctgcagcttctgcaaattttcaggtgcgacaccccgatgtacggcctggctgtccggcccggttttgaatatacggatgacatgcttgataagactgtcatcgtatcccacccgtctcctatcaatttgattaagtattttacccgtaaagatgtcacgtttgatctggtgaactcaacgagcgcagccgcgaaaagagtgaaggacggtttgtccgacatcgcgctgacaaatgagctggccagacaaaagtacggccttcactttgtcaaaacatttaaaagcattcccatgagctggtcattattcggaaaaggagagattcatgatgaaaactgaacaagatttgcaggaactttatttcccgacgcctaaattaatagaatgggataacggagtaagacaatattcgtccgtcagaggcgatacggaagttctgctttcttacgttccgccgcatacaaacgtggaaccgcatcagcataaggaagtccaaatcggccttgtcgtttccggcgagctgtccatgactgtcggagatgtcacaagaaagatgacagcgctggaatcagcctatatcgcgcctcctaacgtgcctcacggcgcaagaaatgagacggatctagaagtgatcgccattgatattaaacgcctgaaagccggtgaaacctatacaagccctgaggattattttttgaatatttttaaaacgagagacttattgcctgggatggaagtcacgttcttcgtggaagactgggtggaaatcatgcttgccaacattccgggcaacggaggagaaatgccgttccataaacaccgcaatgaacagatcggcatctgcatcggcggtggctatgatatgaccattgaaggctgcaaagtggatatgacattcggtacagcttatttctgcgatccgagagaagatcacggcgccatcaacagatttgaaaaagattcaaaatcagtcaatatctttttccctccgcgctataacagagcaaaagcgaaaaaattagaggcgaaagagtcatgaacctgacggataaaacggtcctcatcacagggggcgcatcaggcatcggttatgccgcggttcaggcgtttctgaatcaagaggcgaatgtggtcgtcgcggatattgatgaggcgcagggagaagcgatgatccggaaagaaaacaatgacaggctgcattttgtgcagacggatattacagatgaaccggcatgtcaaaacgccatccggtcagcggttgacaagttcggcggattggatgtgttaatcaataacgccggcatcgaaattgtcgccccgattcatgagatggagctgagcgattgggacaaagtgctcaacgtcaatctgacgggcatgtttcttatgagcaagcacgcgctcaagtatatgctcaaaagcggcaagggcaatatcattaacacgtgctccgtcggaggagtcgtcgcatggcccgacattcccgcatataacgcctctaaaggcggcgtactgcagctgacgcgttcgatggccgtcgattacgccaaacacaacatccgcgtcaattgcgtgtgcccgggaatcattgacacacctttgaatgaaaagtcgttccttgaaaacaacgaaggcacgcttgaagaaatcaaaaaagaaaaagcgaaagtcaatccgctgctgagactcggcaagcctgaagaaatagcgaacgtcatgctgtttctcgcttcggatttatcaagctatatgaccggaagcgcgatcaccgcagacggtggatacaccgcacaatagagaaggagtgtttacatatggagagaaaaacagtattggttatcgctgaccttgggggatgcccgccgcatatgttttacaaaagcgcagccgaaaaatacaacctcgtcagctttattccgagaccttttgcaattacagcctctcatgcggcattaattgaaaaatactcgattgcggtcattaaagataaagactattttaagagtctggctgattttgagcatcccgattcgatttactgggctcatgaagatcatgacaaacctgaggaagaagtcgtcgaagaaatcgtcaaggtggctgacatgttcgcggttgacgccattacgaccaacaatgaactgtttatcgctccgatggcaaaagcgtgtgaacgtctcggcctgcggggagcgggcgtacaggccgctgaaaatgccagagataaaaacaaaatgagagccgccttcaaccgggccggcgtcaagtctatcaaaaataaacgggtgacgacgctggaagatttccgcgccgcgcttcaggaaatcggaacgccgcttattctgaagcctacatatctggcgagctccatcggcgtgacgctcatcaaagagagggaaacggcagaagcagaatttaacaaagtcaatgaatacctgaagtcgattaacgtaccgaaagcggtcacgtttgaagcgccttttatcgcggaagaatttttgcagggcgagtatgacgactggtacgaaacaagcggttattccgactatatcagcatagaaggcatcatggccgacggggaatacttccctgtggcgattcatgataaaacaccgcaaatcggattcacggagacatcgcatattacgccgtccatcctggatgatgacgcaaagcggaaaattgtcgaagctgccaaaaaggcgaatgaaggactcggcctcgaaaactgcgcgacacatacagaaattaaattaatgaaaaaccgggaagccggactgattgaatcagcggcgcgatttgcgggctggaacatgattccgaatattaaaaaggtcttcggcgtcgacatggcgcagctgttattggatgttctctgtttcggaaaagaagccgatctgccgaaaggattattggagcaggagccatgttatgtcgccgactgccacttgtatcctcagcatttcaaagagaacggccagctgcctgagacagctgtcgatttcgtcattgaaagcattgacattcccgacggcgtcttaaagggagacaccgaactcgtttctttctcggctgccgaggcgggtacatccgtggatctgcggctgttcgaagcgttcaacagcattgcggcgtttgagctgaaaggaagcaattcgggtgacgtggccgaatcaatcaaacaaattcagcagcaggcgaagctgactgcaaagtatgcgttaccggtatgaaacagctgaaaccgaactcgaagtatttgcttttcgggcaggcgctttcgtttatgggagactattgcgttctcccggccctgctcattttgtctacatactatcatgactactgggtgacgtccggcgttatcgcggtccgcagcattccgatggtgtttcagccgtttttaggcgtgctcgtggacaggctcgacagggtgaaaatcatgctgtggacggatgtgatcagaggtgtcatctttttggggctgacatttctcccgaaaggcgaatatccgctgctttttctggcgctgctgtttgtctcgtacggaagcggcgtgttttttaacccggcacgtctcgcggtcatgtcgtctttagaagcggatattaaaaatatcaacactttgtttgcaaaagccacgacgatttcgattattgtcggcgctgcagccggcggactttttctgttaggcggttctgtggagcttgccgtcgcgtttaacggggtgacctatcttgtctccgcgtttttcatcagccgcattaagcttcaatacgtgccgattcagtcagaaaacgtaagagaagcttttcagtcgtttaaagaaggcctgaaggaaatcaaaacaaatgcttttgtgttaaacgccatgttcacgatgattacgatggcgcttttgtggggtgtcgtctacagctatttcccgattgtcagccgctttttaggcgacggggaaatcggcaatttcatcctgacgttctgtatcggcttcggcggctttatcggcgccgctcttgtcagcaaatggggctttaacaacaataaagggctgatgtattttacagtgttatcgatcgtctcgcttgcgctgtttttgtttaccccgattttcgccgtgtcagtcattgccgccattcttttctttatcgcaatggaatacggtgaagtgctggcaaaggtcaaagttcaggagaacgctgcgaaccagattcagggccggatcttttcggtggcggaggcgtccatcggattgtgcatcgccgccggttccatgctgatcaacattgtagacgcggcagtcatcatggcgtttatcgtccttttggtcagcgggctgtttctgcatacaaaactggtcaataaatccttttcagaacggaataacgaatcagagcaaatccatttataaggagccttccagatggaaatcataccgtccgatgtcatcaagacacttccgaaacaggaattttcgctcgtttttcaaaaggtaaaagagatggagaaaacgggagcccagattattaatctcggccaggggaatcccgatctccccactccgccgcatatcgttgaagcattgcgggaagctgcgctgaatccttcatatcacggatacggccctttcagaggctatccgtttctgaaagaagccatcgcggaattttatgagagagagtacggggtatcggtcaatccggagacagaagtcgcgctgttcggcggagggaaagcaggtttgtacgttttgacgcaatgcctgctgaaccccggcgatatcgccttagtcccgaaccccggctaccctgagtatttatcgggaatcacaatggccagagcggagctgcatgagatgccgcttcatccggaaaacggctatctgccggattttgagcggattgatcccgccgtcctgaaaaaagccaagctgatgtttttgaattacccgaataacccgacgggcgcgactgcggatcaggcgttttatgaaaaagcggctgcgtttgcaaaaaaatatgacatccatcttattcacgattttgcatacggcgcgttcgaatttgatcagaacccggccagctttcttcaggcgaaagaagcgaaaacggtcggcgcggagctttattcattttcgaaaaccttcaatatggcaggctggagaatggcatttgccgtggggaatgagaaaatcattcaggcggtcaatgagtttcaggatcacgtcttcgtcggcatgttcggcggccttcagcaggcggcagcggcggcgctgtcaggaaatcctgagcatacggagcgtctgaagcgcacatataaagaacggattgattttttcacggcgttatgtgaaaaggaattaggctggagcattgaaaaaccgaaagggactttttatgtctgggctgaaattccgaatgaattcgagtcttcacaccagttttcggactatctgctggagcatgcccatgttgtcgtgacgcccggcgagattttcggcagcggcggaaagcgttatgtcagaatatcaatggtggcaaaacagggcgatttaagggaattcgtgctgcggattcaaaagctaggtttgtcctttccttcattacaagaaacatcccgctgagagcgggatgtttttattatatgcttttcatgctgccgccgtcggctgacacttgctgtccggtaatataggaggcttcttcagaggcaagaaaggcagccagcgccgcggtttcttccgcagttccgacacgcttcatcgggacgcctgaggcaatccgttcctccgcttccgctttagaaatgccgttttgcttcatgacattctttacgaattggtgataacggtctgtggcgataaatccgggattcagacagttgacagtaatgtgaaaaggcgcaagctgaatggcgatgtttttgctggcattaattaaagcggcgttcatcatgctgttggtaaacatattggcgccgggttctttccataggtttccgacgatattaatgattctgccgaattcgtgctgtttcatgatcgctgcggccgttttcatagagtcgatataggcgatcgttttattcgtaaaggtatttgtcatatcctctatatcgcagctttcaaaggtatccggcgagccgcccggaatgttgttgatcaatacatcaagccgtccgcattgtgatctgatctcttcaaaaatgccggctctcgccttctggtccgacatatcgccggccagaacggtgacgcccgcatccggatgtttggcgaggatctcttcttttaccgattcgatattttcgggaactcgtgaattaatgacggtatgaaagccattgtccgccagtttcagagcgatcgctttgccgatcccctggctggctcccataataaatgcggttcgttttgacaactgtctgcacccctttaccaaaatggaatctcctttacatcgtaaaaaaaaatgataaaaatagcaaattttatttaaattctgacaaagaaaaaacccgccggacaggcgggtgggtgttacacgtgcaaaaacttcggaagcgtgtcaagagacaagcggtttccgacaaaaaatgaaccgaattctccgtagcgcgcgctgacttcatcaaagcgcatttcataaacaagttttttgaactgaagcacatcatcgctgaagagcgtgacgccccattcgtaatcgtcaaaaccgacagaccccgtgataatctgtttgactttgccggcatagctccgtccgatcaagccgtggcttctcatcaggtttctgcgttcatccatagaaagcatgtaccagttgtcgttgccgcttcttcttttatccatcggatagaagcagacgtatttcgcttccggcagctcaggatacaggcgtgcgcggacatgcgggttttcatacggatcgccttctccgcttgcgaggtagttgctcagctcaaccacggacacgtaagagtaagccgggatcgtaaattcagcaagctttgatttgttaaattcaagctcgatttcgttcagctcttccattgtcgggcgaagaatcatcagcatgaaatcagctttctgtccgacgatgctgtagatggtttgcgagcctttgccttctttttgggcgacgccccatttttcaagcagtcccgtaaattcgtgaataatcgacaggcgctcatcgctggataacatcttccatgacgtccagtccattgtgcggaaatcgtgaagcgcgtaccagccgtcaagtgtttgggcggcttcgttcgttttttgctgctcactcatgtatcttcactcctatatcttttcattacattgatgccttcactatatcacagtttaaccgtttcggctgtggagaaaccttgaataatccgaagccttgtgtcagaaactaagccgtgaaacaaaccgtcaattaaattagttagaaaaataagatttctttttgaaagcgctataatagaagttggttatttgaatttagctggaagaagagtatgctgtaaaagtaagcgttttttgtcaacatagaggagggaatatcgtggcagatttatttacaaaagtacaagaaaaagtcgcaggaaaagatgtgaaaatcgtatttcctgaagggttggacgaacgtatcctggttgcggtcaacaacttggcgggcaacaaggtattaaagccgatcgtagtcggcaataaagaagacattcaagcaaaagcgaaagaattaaatcttacgcttgacggcgtggacatttttgacccgcatacatatgaaggcatggaagaactcgttcaggctttcgtagaacgccgcaaaggcaaagcgacggaagaacaggcccgcaaagctttgctggacgaaaactatttcggcacgatgcttgtgtacaaaggtctcgcggacggacttgtcagcggagccgcacattctacagccgatacggtgcgccctgcactgcaaatcatcaaaacaaaagaaggcgtgaaaaaaacatcaggcgtcttcatcatggcccgcggtgacgagcagtatgtgttcgctgattgcgcgatcaacattgctcctgacagccaggaccttgccgaaatcgccattgaaagcgccaatacggctcaaatgtttgacattgacccgcgcgttgccatgctcagcttctctacaaaaggatcggcgaaatcagacgagacggacaaagtggctgaagccgtgaaaattgcgaaggaaaaagcgcctgagcttacgcttgacggcgaattccaattcgacgctgcatttgtgccgtctgtcgcggagaaaaaagcgccggactccgacattaaaggagacgcgaatgtatttgtattcccaagccttgaagcaggaaacatcggctacaaaatcgctcagcgcttaggcggctttgaagcggtcggaccgattctgcaaggattgaatatgcctgtaaacgatctttccagaggatgtaatgcggaagacgtctacaatcttgcgttaattacggctgctcaagcgctgtaatccgcaaaagccggtctttacgaggaccggctttttttatagaaagaatgtcactgcggcccagccgaacagggacaaacagagagaaccgatcaagcctgctgcgagcgcccgccagccgctatgacgaaacgccgatatatggactttcaaaccgagacccgccatcgccatgccgattaaaacataagacacttgaacaagaaacgcggaaaacgaagctgaaataacgcctgatgtatggatggcgctcattccgagaaatccgaagataaaccaagggatggggagcgaagcggcagaagccgtctttgactttccgctgcggcgcgcccgcattccgagcatgaatgcggccgggacgagcagcgcgacccgggtcagtttgacgatcaccgccatctcgacggctgcttttcctccggcgctgccggccgccgccgcatgcgccacttcgtgaagcgttgccccgcaaaaggccccgtaagccgcaggagaaaaccccaatccatgataagcaagagaatatacaacagtaaaaacggttcctaataacgaaacggcggccgcgctgatggcggctgcattttcatttgatctgatctgcggcgcgatcgcggcaatggcagccgccccgcagatcgctgtgccgcaggctgtcagcgtgctgagtgtctgatctatacggaacagccgggacagtccgtatacaacggcacccgcaaacatcatacagcagacggcaattgcaaatacgtgccagcccgcatgatagatatccgccagattcagtctcatgccaagcaggatgatgcctgctttcagcaagtatttgcttgagaacgcgatccccggctctaatgccgcccgctgtccgaatacggcgcgccagagcatgccgatcagcatggcaaggacaagcattccgagcatatgcaaaaacggcaggcggctgacatagaaagccgcaaacgcaattcctgcggtaactgaaataccctttatcatcttcatctcagtcacttcccattatcttgataactccactttactgcggtcttaatcattagtaaaatatatttatatgatctaaacgattaggaaaaataatgattaggggcgatgctttttgtattacggggaactgaaaacattcattgccgtcgtggaagaaaaaaactttacaaaggcggcgcagaagctgatgatttctcagccaagcgtcagccttcacattaaaaacctggagaaagaatttcaaaccgctttgctgaaccgctctccgaagcactttacgacgacgccgacgggggacattctctatcagcgcgccaagcagatggtctttttgtacgaacaggcgaaatctgaaatttacgcccaccatcattatgtcaaagggaagctcaaaatcgccgcgagctttaccatcggcgaatatattctgccgccgcttctcgcaaagcttcatgacgagtatcccgagctgaacctggacgtcatgatcggaaacacggaggaggtcagcgaagcggttcggatgcttcaagccgatatcggattaattgaagggcatacggggaaaaacgagctcgacattcagccgtttatggaggatgaattgtgcattgccgcaccgaacggacacccgctcgccggcagaaaaaacatcccggctgccgaattgcaaaatcaagcgtgggtgacaagggagaagggttcgggaacgagggaatatttagaccacgtccttcaatcaaacggactgcggccgaaatccatgatgacgatcagcagcaaccagggtgtcaaggaagccgtgatcagcggaatgggtctttccgttctgtcaaaaagcgtgctgcaaaaggatctgcttcacggcagcatttccgtgcttgagataaaaggattctccttaaaacggaaactgtctatcatccaatcttccattatggagaacacaaaaaacaaagaaatcttcatcgctcttttgaaaagccaatttcaatcatctcaagcggagtgatataataaacgcatggaaagcttatgacgaaagggatttaatatagatgggaaagcaaccgattgatttactgatgcagccgagctggagaatcattgaccaatccagccttggcccttattttgatgcgaagcagtcattcgcaatggatgatacgctgtgcgcctccgtaggcaaaggggaatcgcctgcgacggcacgcacttgggtgcaccaccggacgatcgtgctcggcattcaggacacacgcctgccgtttttagaggacggcgtgaaattgctggagggcgaaggctaccgtgtcattgtccgcaattccgggggcctcgcggtcgttctcgatgaaggcgtattgaatatttctcttatttttgaagatgagaaaaaaggcatcgacattgacagaggctacgaggcgatgacagagctggtgcggcggatgctgtgtccgtacaatgccgaaattgaagcatatgaaattaaaggatcgtactgtccgggcagctatgatctcagcatcggcggccgaaaattcgcgggaatctcacaaagacgcctgcggggcggaaccgcggttcagatttacctctgtgccgataaaagcggaagcgaacgcgccgatctgatcagacgtttctatcaagccgctttaaaagacaaaagcaacgatacaaaaggcgtatatcccgatatccggcccgaaacgatggcttcattaagcgaattgctgcaaacggacattaccgtgcaggacttaatgctggcgcttttgactgaactgaaggaactcagcggacgcctgtatgcagccggattatcgccggaagaggaaatggtatttgaaaaaaatctgatccgaatgctggaacggaatgagaaggtgttcggcacgcaggaaagcttggactgagtccgggcttttttatttttggtaattatatactattcagttatagtgaaaaagaatcgttatatcaaaactagtttacattatataccttatttgattaatatatttatgtaggttccaaataattctataaactgaaggagatggagatatgaactttaaaaaaataaaagaagaaaaaagaatcacgatccctacacatttgttagccggagatgcggaacaatcaggcaattctttcgcttggagcggctgggtgcttgtagtgccgagccaagaagacaatcaaaacccgaatttgaatttctctgatttagccgctcaaaagtaagataatgactgtttggagcctacgcattcgagacgaggcggtgagagtgtgacacaagagtatataagagaaattaagcggggagcactgtcatggattgttgaaaatatccattattttgatatgaaacataaagtagcgaatgatttcagatggcgccttaaaacatttatagaactcatttttcttaccaattacctgatcagaaatcaggcagatgataaggaagttgctgttttaacggagtttattacagaaaggctccgtaatgatcagcttgaagaatttattcattttgatccggacggtctcgccggattggctattgcgggtgaatttcttaccttgactgatcatccgtcacaagcttcagtgatatgggagctggaaaaattcacggcagcgcgttttgattgcagccttgctaaaattccctttcgaaaaatggatctgaagtacagtctgcaaagagcaggcgtaacctcggaaataacggatttttctgacttatatcactacacagcagctggtcaggatatcccaaatacatatatgacggatcatgatgcatacagtatcactcatacgattttttatataacagacatgggatgttcttctcttacggataaagagtatcatctgtcgtccttaaaagaaaaggtcctgaaatttctcgggatctatatctgtcttgagaatttagatattaccagtgaattattgatgtgcagctcttttttacatatcgacatggataaggacaaccataaaccgctctatgaagcagcctggaataaaatctatcggggccaaatgaaagaggggaatgtcccgagcatcacctatcaacataaacccggtttgaaaggtgaacagcgaagagaagatgtgtttaaacattgctatcatacaacacttgtcgccgcgggtgccgcgcatgcctgccttagagcagaaaggaacgattaacttgaacagattagctgaagagacggatcaatttttattatcttttgctgaacaatcgcttccggatcaaaagagcattcagctgtttgccggcttctgcaaatactacagaaagacgagccattcttccgctgtaaaagaacatactgaaaggattgcctccgctttcgttgataagtcatgctgggaagatctgtttcactgtaacacggccattgtcaatgagttgattcatatctatttaacggcaaaagcttataaaaagaagcagggaatggattcggatgatcaagtcatacgtcacggattgcaaaacggctatcttataaaaaaagaatggccttattttaaatacgccgaattcgccggtttgctgaacgagctgggaatgtcaactgaccatgaaaaagtgcgcttttacaagaattcgatatttcagcctttgctccatgacgcatggaaaagaacagctgaaaacgagctggagtttgtcgagtactgtcttcttcatttagatcagggagagcatctgcttcatcccggcttgaaggcgtccattcaaaaatggcttgtgttttgtctcggcagccgaaaaatgaaacagctgtgcaatatgttatttatccaatcgtgtatcgatccatttttttatggctgtcaagcggctcttcatcatataaataacgagaatccatccattcattgtgctccggctcttctgccggcgattgagattctgaatctggagtgtggaacatgcggatagtcaaggaacattttaatataaaaaaacagaagaatggctgctgggtttttggaagaacattcagctgcagccggaagaaatggaagcagatgatctcatgcacctgttttgcggtttagcggcatgtcatcactttgaaaaaagaaaggatacagaagaagtcattctattcttagaccgttattttggagaaaaaacgcacgaatgccatccggtcctgttcgcgtatgcgtatcatatataccgcaggatgaatgccgcaaaaagcatcttttttcataacggacttgaacaaatggtccgcggtttacaagaggaactgaaatcagagccttcctctatgatcctcatggtgttagcagcttattttggggcggtgaccccggaagaactgatcgttttcttagaaaccgcaatgaaacgtgaggccgatttgctcatggcaccgggcagcatccaggaagagcaggcagatgccctttatgccgtctcttatttgcaaatgaaaaaattgcagccttttctcacggaatggtacaaaacatcagactttgctttttcaggtttaatgttagccgagtgcagaaagtatcacattgacgccgttgcaaaatacacagccattatgaaatttctccgattcgatgaggcgctttttatacgggaagggcgggaatttctacgctttcagcagcgaagcagcggaagcttcggttatttaaatccattagcgatggaccaaggggcggtcagcggcaaattgctggaccgtcaatatttcctgccgtccgctcattatgccgccgcctctctgtctatgctgtaatgtctctcttttgaaagacggaaaaagaaatcaataaacaaataagaaagtagatcgctataaccgtcacggaataggggatgtttaacgttgaaatcgcatcacccgcacttttatttacataagcaacgaggtttaaatgcggaaagagtgtaaatttataccatgtaaattgggcaagcaaatcagttccgcccaatatactgccggcaaacagcagtaaaatggataagcaaagggagagcgcctggcttttgcacaatactgacaaagtgaacgcaatggtgacaatacttataattgatatgaaacgcaaaagcagaatgattccggatgctttgattgaactgatggtatacagactgtcatttaaatgagtatagacgagcggatatgaagcattggaaaaaccgaataacacgccgccgatcagcaaacagctcacacagtaaaataagtaaaccatgccggtaaacagaagagaggccagaaatttcgatgttaaaatccgccatcttcggttcgggcttgtagcgataaacttaatcgtcccaagggcaaactctttagaaacaaccccgctgacggttaaaatcgcagtcaagcttacgaaaatctcaagcccgtttgaagtaaccgtgccgaaaaacctccagccgttccattcataagggttgatgttatgctccaaataatagtctttattcttaacatcagcagaataataaacgcctgccgtttcagccggtttattaatttcttcctgttttttttcggcgagaagccgttctttccaattgttatccgaggaagcatctaactcatgattcataataaggccggccagcaaaacgatgagaaacaggaaaaaaagagataaaagtgtgcctttttttcgggttatttttatgaattcgttctgcgtcagatgaaatatgctcataccgcgtcctcctgatctgtaatcatcatgtatttctcttccaatgacaaagtccttgcagaaacgcgggaaatcagaatctctttctctgccaaagttttaatgatatacgggatggtatcttcctccgcttccaattcaatgatgcggctgtctttttgctgtacttgaagaataccgtcctgctctaatatttctttcgcccttgccggatgatcgaccgtgacggtaaacagctttttctgaccaaggtcatttctgctcttcatgtcttcaattcctaaaatccgtccctttttaatgtaggcaaccctgtcgcaaatctcctccatttctgacaataaatggcttgataataaaatggaaaccccttgcttcgctaaatcggaaagaatgatgcgcaattctttcatacctttaggatcgagaccgttcatcggttcatccagaattaataacccgggattgtgaagaagagaataagcgagccccaagcgctgtttcatgcctaatgagaaatgtttcacttttttgcgggcagcctgctccagtccgacttttgcaagggtattcataaggtcatccgttcgcagcgaggtgctgcgcagtttagtaaaatattttaggttttgcaaagcggtcatattcggatacatatccgggccttcaatgataaccccgatatgtctcataaaatattcaaagtcgctgtccggtctgcctctgaatgaaatggctccttctgtttttttaataagctgtacgatcattctgaaaatagtggttttacctgagccgttcggccctaaaaggccgaatatctcgccttttctcacatcgaaagaaattgactgtacaataggggtatgattgatggttttagagacatcttttaatatcagggctggttcactcatgctacttgcacaccttccttatgatttagggtaaaagccgtcaaaaccgaagaacatgcttccgatcaggccggcagcgattaaaatgagagcaatgctataccacatttttcgattcaatggtttccctccttacaatgctgacattccatttgaaatagcgcaaaaagatgcggaatatcagtttcgaaagatcaaatccggccataaacaccgccatacccgctccgaggaccatacatccgttaaaaatggctgttacaatcggcacttttatgaggagaaagaatgatccggtcatcagcatcaggccgattgccatcaaacttaacaccgcaacagaggcaaaaagaaacggtgtcagcataaacatgaagttgaacatgcccatacccagcatcaggccgaatgctttgaaaaaggagcgccatgttttctgctcctcggcatcactgatgaaaatatccgcttttaaggcgcgcgcaagtgttttggggtttcctaaattgccggcgatttgttcatcgctttttccttcagcgacgcccatttggaatatttcgccgatatcggcgagtatctctttttgctcaaattccggcagatcttttatttcccgccggagatgttttaaatattggtctttacacattcattttccctccttaatgatgctgttcactttttcggacaggtcaagccattccgattttaatgtgtgatgataaaaggcgccttcttctgttactttgtaatatttgcgtgacgggccttgatctgaagctgctgtatacgtttttaaatagttatttttcgtaagtcttcgtaatatggggtagatggtgccctccgatacagggaacgtttcacttatgaccttgattaattcataaccatataaatcttcataaagaagcagggacaacacacaaagttccaatgctccttttcgtaattggctactcatttactatcattcccatcatatctaataattgtattctctatacagtgtattgcacagtagctaatcgatcaataattcccaagaaccatttgggatgaggaattgaatctttatgcttatgtgcgggcggggaccgagatgcgcagcccttgcgggaagaaggcctcctgaacaatgtttacattaatatagatcaggatgcgcgtcattgacaaatggcaaaaacccctttttccatgacaagaaaaggggttttttgcgttattcggccattttttctaaattgccgttccggtccattttaaaggacggagacgcatgctcgtcgtcttcaaataaaactagttttctggctctgttcataattttcaccaaggtttcgtagtcttcctgaatggttttttgatctttttcaagtttttcgacggccgcttccagctgctcggttttagactgaagttcttggttttcccgttttaaacggtcattttccatctgcagggcggaagtttgctttccgctgccttcatagctctgcagaaattgaatgacgtctgccattgtgagctccgccttttggctcggctgctgaggcgccagcaaatgtgataaactagctaactcttccttgaagctttcatcgacataaggcatatgttcgccggacatgacggcttgccgatcctcttttggcgcttccgtttgaaccgtctcttcggctgcggtttcttgaatgatgtccgcatccggtgcaggcggctggtataatagtttcttcttggccggctggccgtttccgagcgcgcgcatccgctgtttccgctgtttttttgcaagctgaagcgctttttcatattgatggcgcacgacggcattccatctgaatccgcacgctgccgacgttctgtttaatttatcgcctacctcttcaaaggcgttcagctgcgtgcttccttcccggacgtgccggagcacggtttccgcaagcagcaggtcattttcctccgaccaggcgtcctgtctttgctttgtcaatgttctcaacccccaataatctttgatggtattagaatgtccagattggaaaatatttatacaaattggctgaaagaatgagagatacgcagagccttgcaggataagatgaatccttgtacaataaaacgtgatgtgatttttttcgtttttaaaatttaagatttaacatagaggaacattgaatgaagggaagcgtacatcatggctaatgaattccgagtgtgtgatgattgccaggccaccaatattaagacattgctgccgcgtttgaaagaagctgacccggatgcaaaagtggaggtcggatgtcagtcatattgcgggcccggacgcaagaaatcgtttgctttcgtaaacaaccgcccgctgtcggcgccgactgaggacgagctgattgagaaagtgaaaaagaagatcaaaaagtaaatgtgcatttttacgacagcctcgcccgatgggtcaggcttttttgcttcaaaaaatcaatgattgaaaactggaacaaaacgccggacaaattcaaggatgttttcaaattacagagccgatataatagaatcacggctaaaaaaaagagggaatgacgatggcgtatccaaacggaaaattatcagaagaaaaagtgtttaaagatcccgttcaccgctatgttcatgtgcgggacaagctgatctgggatttgatcggcacccgtgaatttcagcggctgcgccggatcaaacagctcggtacgacgtatttgacgtttcacggcgcggaacacagccgttttaaccattctctcggcgtctatgagattgtcagacgaatggttgatgatgtttttaaagggcgtcctgaatgggatgacaatgaacgcgaactctgtctcagcgccgcgcttttgcacgatttgggacatgggccgttttcgcattcctttgaaaaggtttttcatctggatcatgaagactatacgagggaaatcattctcggcgacaccgaggtgaatcaggttctcagaaaggcgggaccgggatttccgcaggatgttgccgaagtcattgccaaaacatacaaaaacaaacaggtggtcagcctgatttcgagccagattgacgccgacaggatggattaccttcagcgggacgcatactatacgggcgtcagctacggacattttgatatggaacggattttaagggtcatgcgtccgcgagaggaccagatcgtcattaagcaaagcggcatgcacgccgtcgaagactatattatgagccgctatcaaatgtactggcaggtgtattttcatcccgtgacgagaagcgctgaagtcattttgacgaaaattctccaccgtgcgaagcagctccatgaagaagggtatatattcactcatgctcccgttcatttttattccatttttgaagggaagctgacgcttgcggattatctgaagcttgatgaagccatcattttatattatttccaggcttgggaggaagaagaggacccgattctgtccgacttgtgccgccgcttcattaaccgccagctgtttcaatatgccgaatttaatccgaatgaggaaatgtcggcttattttgaactgaccgctctctttaaagaggcgggaattgatcccaattactatttagtggtcgattcttcatcggatctgccgtatgatttttaccggccgggtgaagaggaggagcgtctgccgattcatctgttaacgcagaacggccagatcaaagagctgtccaggcagtccgccattgtcgaatccatttcgggcaaacgccggacggaccataagctctactatccgatggacctcatttgcgacgattcagaaaaccctgaagcaaaattaaaaatccggcagctgctgggactgacatagaaggattttggtaaagaaggaaaaggagatgtcgggaatttgttgaaagaacatgcaaaactgatgaaggtgttctcggattctggagaaatcatcgggcggaaaaagctgcagaaaatcatttatatcgcgaagaaaatgcagtatcctttctacgaaaaatatgattttcatttttacggcccgtattccgaagaactgacgcttcgaattgaagagctgtgcaatcttgggtttctggatgaggtgaaggaaaaaaagggcggctactttcaataccggtactcgctgacggagacgggagccgagtttttacatcatgcggagcttaagatgccggatatgaagaagtacatcgacagcgtcaacagccgctcatcccggtttctggagctggtgtctacgattttgtattttgacggccttgaagctgaggaaaagaaagagaaagtgtttacgataaaaagcaaacagaaatatacggatgaagaatatgatgaggcgcttcactacatagaagagctgaaacacatttgttaaaggcgatgctttcgtctttttttatgaaaaaaccaggccgcgatgaagcgggcctggttttgtttattgtctcaatttgctgtgcttgtacgaatataaaaagtaaacgatgacgccgatgatcagccagacggcaaaataaagccacgttttcagcggcagattgaccattaaaaacaaacagcagataatggccaaaatcggcagtacgggtacaaaaggcactttaaatccccgtggcagatccttatgggtgcggcgcagaatcagtacggacagactgaccatggcaaatgtcaatagcgcgccgatgtttgagagatccgacagctctttcagatcaacaaaacccgcgatgcatgcgctgatcagtccgatcagccacgtattaaagatcggcgctcccgatttctttccgacaatggtaaagactttcggcagcattccgtctcttgccatcgcaaaagatatacgggtcgccgcataggtatgagcaagaacgacggccatcagtccgatcaccgcaccggcagcgataatgcccgccaccgcgttttgtccgacagtctgcagcacataagacatggcttccggcacattaagctgtgaatacggaaccatacccgtcatgacgagacagacgatgacgtataccaatgtacagatcaccagtgaaccgataataccgatcggcaggttgcgctgcggttttttgacttcttcagccgaagccgaaatcgcgtcaaacccgagaaacgcaaaaaagacggcagaagcccccgtaatgacgcctttaattccaaaaggcataaaaggatgccaattgcccggctttacaaaaaagcttcctgtgatgataaacagcaaaacaattccgatttttacgagaaccattatattattaaaggttttgctctctttagagccgcgtgacagaacgacggcaattaatagagtaatgatgatggcaggaaggttgacgatcccccctggctcggcacgtgcagcagactgtccggcaaaggcatgccgatttcggctaacagattattaaaataacttgaccagccgcttgccaccgctgacgccgtcaccatataaacggataagagcgtccagcccattaaatggccgacaatttctcccatggtggtataagagtaaatataggcgcttccgtaaaccgggagaacagaagcgatttcggcgtaacataatgctgcaaggctgcagacaacggctgcaatgataaaagaaaagattacggaaggcccggcgtttttcgcggctgtaatgcctgtaagaaccatgacgcccgtcccgatgacggcgccgatgcccagtaatgttaaatcaaatccacccatcgttttggcagtctgcctttttctgctttgttcaagcagctgggtgatgtcttttttttgtaggatattccgcaacacgcatccctccatccaaaagcaaaagccaagagggactctttggcttttacccgtgtcacatcttctgtgtaatcgacaatcctgtgttctgtttccccgtctgttccgtttcttttcttttccaatcatattgtctgccgcatccgatcagattatccttaccgtcaaacgcagtcacccttaatgattttacctgaatcgtgtctataaaaccagcattgcataaaaggatatggtaaaaaagagggagacaaaagtctgtgcagggcaggataaaagttgcgggcattccggccggaattttgactttctccgtaaggtatcagtaaaatgtaataaaaaacaaacaaatgatgatggatgcatcttgaaatggggagtttctgcatgaagcacgataacttgcaagcaaatgtactggattacgcgctcacgaaatatttaaagagcacgaaaaagcttgatgaggcgacaattccaaagagtataaacaatatcagaggatttattctgaggattatttaccggcacggcacgtgcacgattaaagatatattgcaggaggtcacattatcgccttccgccacgacaaccgctctcaatcatttagaaaaagaaggattcgtggaaaggtcgagaaacaatgaagaccgccgcacggtatggatgacgctttccgaatcgggaaaaatggcggccatgcaaatgattgaaaaccggcagctgctcattgacgaactgttcgaagcattgacagaggaagaaaagaaaatctttttcagcctggttgaaaaggttgtgaaataagccggcctgacatagcagcgccggccattatcaaggattactccgtatcgctgatccgtttgccggcgacggcgtaatgatcctttctcatttcttcaatcatgacaatgatcttttcttcggctgcgccagtcgtttcttttacggcttcggtcactttttcaaccagattccgtttttgttcatctgtgcggccttcaagcattttaacggttacgagcggcatggtgctgatcctcctttatcgtttcctctctttggaagagagatcacttatagtatactgaatgaaggacaatcttgcatttttaaaaaaaggggattttgacatttggacagatttttatattatccgctggagcttatgccctatgtcgtgattacgctgatcgtggcatttacgatgcatgaactggcgcacgcgtatgtcgcgtatcggttcggagacgataccgcggcgagacagggcagattaacgctcaatccgattaaacatcttgatgttttcggaacgattctaattttggtcgcgggtttcggctgggcccgtccggtgccggtgaaccgccgcgcctttaaaagaccgcggctggcgggagtgctagtttccgtcgccgggcccgtaagcaacctgcttcttgcctttatcggtttctttttgctagtgttgatgcatgcttacggaatggagctgctttctgcattcagcatggggcttgaccgctttttctctatttggattcagctgaatctcgcgctgtgtttattcaacctgctgccgcttcctccgcttgacggctaccggattattgaggatctcgtgccgccgcgggtgcgcgccaaaatgactcagtttgagagctacgggattatcgtgtttctcgtgctgtttgtgacaccggtcggctcctatgtcgtgtggccgctgttaagcgaggggagagactggattctcaaggtatttgccattatatttcaaccgcttttgtaggagggtattttcatggaagaaaaaaagaagaaaacaatcggatttaatattattaaaagtgatccgaccgacggacatggcggttttggcgccgggtcgctgagccttgacaatatttctccggtatttgtcgatgtggaagagaaggaagctttcgtagacatcggcgcaatgcatgcccgcagtgtcgttgaaaaaggcatcaaattcctgccgaacaaagatgaagtgccgaacggaaaaccgtactggctcgtgtgggtcaccatcgacagaaaaaaagaaggcccttattacgcgggtgtgacggcttgtgaaatgaccgtggacagaagtatccgcagaggctataagtcattgccggagcatgtgaatttaatggataaatcaatgaagcgccgcattatcgtggacaaaatggacgccagctcaaagcaggtgcttgctgaatttctgcagaagcatgaccaagggctctgggaacgttcatccgatgaattgaaaacaggtctgcttccgggcgaaaaataatttgtgaactttttgtgaactttataaatatttgcactatttcgcaattgtactgagtaaactgttgatacagaatcaggacatggaaagtcccgagccgaaccaagactcggggtttttcatgtttacgcggaggtttcatcatgttcaccgtctttgacatcgggccttggatcattgaagcagatacggcggaaacgagaaaacaatatgaaaaatcatgggctgatccctgcgattgcgggagctgccggaacttttccgaggcggtgaatctccttcccgccgagaaaacaagattgtttacgcagtttgggattcgtccggctgtctgtcacgatttgggggagcatggaaaggaaaacggcctgcatcattatgcgggcagctatccgattgtcggcatgcttagggaaggctggccgaagtttcacattgagagagcgggagatatccgcttttcgttttctttgcctagtacaacattttttataccgaagggttttcctgaccctattatccatctcgacttttcactcttgctcccatgggtgcttgaggaagacgcggattaagcccggcgcgcaatgcaccgggctcagtcttttttgccgagccacttatcccaccactttttgcgcggagcttctttacgggcggggacgtgttccttttcttttttagacggttccggtccgtagcacacatccgcgggctcagtgcctgcgatgaaatacgtgtaatgctttgcggcgcatccgggtcccgaagtgtagccggaagcggggtcaatatagacgcccgtgacgcccttcggcggtttaagcgctatttccggttctccttcgagcgccttctccataaagtccgcccaaatcgtcttcgcatagcttttttcttctactgaatcaatcgtgctgcttttgtcatagcctgtccacacaccggcggcaagagcccgattaaagccgatcatccagctgtctgcgctggtcgtgcctgatttcccgccgtacgtccgggtcagccggtctgaaatggtgcgtcccgtgacggaagtatagccgtttaaatcctcatcaaacatgcccgtcatcatgctcgccgtcacaaaagcggcttttttatcaagcgtctgctgatgtccgcgcggctgttcatacaagaccttgccggcggtatccgtcacttttgtgataaaggaaggggtgatttgttttcccccgtttgcgagcatcgcataggcattaaccatctcaatcgggcgcacgggttcagttccgagcgccagagacggaaggggctttaaatgttcgctgatgccgaattcctttgccgccgacacgagcttattcatgccgagaaagagatgggtcttcacggcataaatgttgtctgataacgcaagcgcctgaagcagcgtaatcggtttattggcgtagtagccgttgtaattgcttggagaataggtatctccgttgtcgtcaatctggaactctgtggcttcgcttttcatcagcgtgaccggtgtaaagccgctttgaatcgctttgtaatacaaaagcggcttgatcgtggaagccggctgccgtttcgcctgtgtcgcccggtcaaacgggcttttttcgtagtcacgtccgccgagaagcgcaagcacgcgccctgttgccggatcaatcgcggaaaagccgacctgaatgtcagagccggtacggatcgtatgtgccacagtgttttccgcgatccgctgcatgcgcttatcaagcgttgtataaacacgcaatccgctcgttgcgagctgttcgcgcgtcatgccgagctttttctcgagttctttcatcgcatcatcgtaaaaataaggcgccgttttcgccgcggttctgcttttcagcggctgataggcaagcggcgttttcttaatcctttccgccttttcttttgagatcattttttgtccggccatcagacggagaatggtttcctggcgctgtttggccttcttttcactgacatatggcgaatagccggacgggcctttcggtatgcccgccagaagcacggcttccgcatcgttcagatctttggcgtgtttgccgaaatacaggcgggaggcggcttcaattccgtatgcgccgtggccgtaatatatcgtatttacataaccttctaaaatctcgtttttggaatagttctgttcaaggcggatcgtgtaaaatgcttcgttccattttcgtttccatgttttatcatgctcaaggtagagatttctcgcgtattgctgggtgatggtgctggcgccctgaaccttggccattgcctttatgtcagccagcgcggcggcggccatccgccggtaatcaaaaccgtggtgattgtaaaagttttgatcctccaccgcaatcgcggcctgcaccgctgtcggattgatatcttttaaccgaacccagtagcgcttttccccgaaatcggtctcacctagctttgagccgtcatttgcataaagaatcgtagactgaggaacccggacggagggggcgccctgccatttcgctgcaagaagaacggatgtgaagcagacgccggccagcattccgccgatcagtgtcagaaagatgcaggcgcggatgattttgaacgtgattctgagctgttttccagatactttatccacttttgggaaccccctttttcatgattctattattatgtgaaaaaagggggttttttaaacatatcaaaccggacacttctttactttttcccctccatcctctatactttttccttaggtgaaaatgagattttaaccggaataaaagcgatacagacgcttacaataaatgaaataagccttgaaagggagatgacaattgagcgagctttggtatacggagaagcagacgaagaatttcggcattacattaaaggtgaaacaaacattacatacggaacagacggaatttcagcatctggaaatggtggagacagaagaattcggcaacatgctgttcttagacggaatggtcatgacatctgaaaaagacgaattcgtctatcatgaaatggttgcgcacgtcccgttatttacgcacccgaatccggaaaacgttctcgttgtcggcggcggagacggcggtgtcatcagagagattctgaagcacccaagcgtaaaaaaagcgacgcttgtcgacattgacggcaaggttattgaatactctaaaaaattccttccgtccattgcgggcaagcttgatgatccgcgcgtcgacgtgagagtcgatgacggtttcatgcacatcgcgaaatcagaaaatgagtatgacgtcatcatggttgattcaacagaaccggtcggaccggccgtcaatctgttctcaaaaggcttctatgccggaatttccaaggcgttaaaagaagacggcatcttcgtcgcgcagacggacaacccgtggtttacaccggaactgattacaaacgtacagcgtgacgtgaaagaaatcttcccgatcacccgtctgtatacggctaatatcccgacgtacccgagcggcctgtggacatttacgatcggttctaaaaagtacgatccgcttgaagtagaggacagccgtttcttcgacatcgacacgaagtattacacgaaagagcttcacaaagcggcatttgttcttccgaaatttgtgagcgacttaatcaaataaaaacgtacggcgcaggagcgaatcttgcgcttttttacaggaaagcgagggaattattgatgagatttgatgaagcatattcaggaaaagtatttatcgcgagccgccccgactggaaagaggcggacgccatcctttacggcatgccgatggattggacggtcagctaccgtcccggttcacgattcggcccggggagaatccgcgaggtgtctatcggtcttgaagaatacagcccgtacctcgaccgtgacttggctgatttgaatttctttgacgccggagacattccgcttccgttcggcaatccgcaaagaagccttgatatgattgaagaatacgtggacggcatcctagaaaaaggcaagttcccgctcggcatgggaggggagcaccttgtatcatggcctgtcataaaagccatgtataagaagtttccggatcttgccatcattcattttgacgcgcacaccgacctgcgcacggattatgaaggcgaaccgctttcccactctactccgatccgcaaagcggccgagctcatcgggccgcaaaacgtattttcattcggcatccgctccggaatgaaggaagaatttgaatgggcgaaagaaaacggcatgcacatttctaagtttgaagtgcttgagccgctgaaaaaagtgctgccgcagcttgcgggacgcccggtttatgtcacgatcgatatcgacgttcttgaccccgctcatgcgccgggaacgggcacggttgacgcgggaggcatcacgtctaaagaattgctcgcgtccatccatgaaatcgcgcgctcagaggtcagcgtaaaaggcgccgacctcgtagaagtggcaccggtctatgaccactcagaacaaaccgcaaacacggcaagcaagatgatccgtgaaatgctgcttgggtttgtgaaatagaaagaatttcccccgcttgaaacatggcgggggatttttatattgtatataaactacttagaagttagtaaaagaaatatattattttactattaataattgatgttattgataaaaattatataatagggtattatttagtaaatacatctttagaaaggaagttagaatgaaaacagcagtagaaaatgaattggaattaaaaaagattgaaatttcagtaattaaactgataattgctgaaaagcctaataaagagatcgctaagtcattaaactactcgcagcgtaatgtcgaatatatcatagccggtctttgtaaaaagtggaatgtaagtactagagtcggtattgtttcggaagcatataaaaggaattgtatacagtgaacgaaatgaaagaaaaacccctattgagggggtttatttatatatgctaaaaaaacattctatacaggaatgccgtaaaaataaaaactgagattgtcaggtagttcaaatttgttctccatttcagaagaataaacaaaagaaataagtatgcaatattgaacaaatcaaagatagaaaaaatcaaatgattacttgtgaaaaataaactagtgtttggatgttgtgcgaaaatatttttgaatgatataagaaaaaacttaatcgcgaccgggatgttagaaaacataaatagggaataaaaagttttgatcttaatctgagcgccaagaaaatttataatgagaaataatacgaatccttcaaaaatgaccccgaacattaaaagaaacagtgcggctattgcaatgatgtaatctaaatgttttacttgctcaacaacttgtatagggatgtttttgggaattaaacttttcataaaaggtaaaagggaacttaaataaaaagctaacccgataatataaaacaaaaacgaggacaaaaaattaatgtttcgttccttaaatgaagataattcaatttgcataatcctaagaggctccttttataaagataggtgtaataaatgtttctaacatagctgctatcattaaaccgagaaatataataccaatatatttaaaagtgaatttcaaatttattttgaggagtaataaatctaaagttaatttcattcctacagaggctgcaagaagcaataccggcacttcaattattccatggggtataacaagcagtaaaaggtttaaattgtctttaatgtttcctatcgcatttcctaaaattaatccattaataattaaaacagcaaccgtgccaagcgacagcgttaacgggcctaaaaaaacaagcagactcgctactttaatattattaaagaaaatctgaaaaaaatccggacggatatttcgatttagattatttacatttgaagcggaatctgtataaatatatgctgtaaataaagcaattaaaaataagatcagacagagtatgtacaatttgactaaaacattctttttaaacaatgtattttcatccattcgttaaagggactgccagggatattgaatttaatgttttatattatgctgctgctgtacttgctgcagccaattgttctaaaacggccaatggcaagcctgcaccaagagatcctaaaacagtaatgatagccagaactgatcccgttgcggtgatagcactgacaatccaactaggagcgataattccagctctgtttaaaatatcgataacatccatgcttaaatgattatgtttcatactgaaaagagcgagaacaatgattcctgatgctactaatgtaaaaatcgctttactattttgtgtttttaaaagtagattcattttttcctccaattttttcaatatccccagcaagttaaataataaaatatattggaatctatttgaattgcggatttccgaaaaaataatagttaagaggtgaaatccgtaaaagtatctgctggcttatttcgtacaaagaaagccggaccatatgtatgatccggctttctttggtactgaaacattatacttttttttcaaaaataatatcaaaataatcagctgccccatagcctgaaatagcaggagcaaatatttgaaccagctttcacccttgctgcgaatacttttcaataatttatttatagtcttctttaggctttcctttccatcggtttacttctgcttttatgaacttgtattcgtacattgctgtataatcctccggaagtgtattggaatcgttaccttgtttttcgattttgataaacttgaatccataaatagagcgcgcagcctattaaaagaatcggaaattgccatcctgtatttccgtttttaaaataatctattaatgaccatatcagtaaagcgacagtataaaaactaaatgctattctggcggctgtacccgattggtgtttttgcatctcatccattttcttcataagaaccgctcccttaattttttttggcgttatagttgaatactttatctattcccgtatttaaagcgtgagctatcgaaaaagccagacttaaagtcgggtcatatttattattttcaattgcattgatggtttgcctggtcacattgcagagcttagccagatcattttgtgaaatatcagctgctgttctaagtttttttatattgttatccactaaaaccctccttaacttattttgttttttattttaaattttcaaatttatatatatttattttaaataatatatgtataagtgtcaaatactttttacacatttgagttctaaggtatgttttttgtttttgtaaattagttgtttatataaaaaacggcttgcagtttaacctgcaagcctaaaagtaattatcatttaaatcatagctctttgtgctacttcgaattggtgtgaaggtgtattcgtcatatctgctgttataaaaactgaggttacagctaagcaagtgagtaagaccttatacttcagcttcataaaaagttaccccccttgaatatgctgtcttgcttcttcaacttttaaaaagtatgttgaagcttttttataatcttcaagtttgtgataatatttagctgcatcaagagcaaaatcttctatatctgcatacatcatcttactttccaaaaagtcaaaactccttttcattgcatcctcatcaggtccgttcacatacaaagattttaaaaattcgaattcatgtaaataaactgaatctgctgactcttcggaatagataactccttttttatgatactcgagcgctttgtcgtatctttctaatttataatgaatctgtgtcattaaaaaatatgcttggggcaaagaaggggtcattttagcactttcaaaaacatcaatggctttttcaacataagttatagctgcttcatagtcgttcaggctttgtttgcaaagtgcgatgttatacagcgtcctgcccattaattgaggctgtttttctgtttctgccaaagaaaaagccttttgaaagtgagtaattgcccgatcatatagttttaaatccaggaaatttgctccgaataaggattggcattgtatgagcctgatatcgtatgacgactgagctttatatatttcatatgcctgccttgcgtaatcggtagatacatacgtttgtttcaaatagtagtagacttcagacatcttgaaaaagtactcggctttatcaatagtatccttaataaatgagagtttcgtctcagcctttttaaaaaattttatagccgacaaatattcccgctgatccagctcatacatcccccggaaaaaattaaaataataatcaagccgtccggtcagccgggcctgctttttatcaatatccgcgagcagatccgatagtctcggctgttcttctatccgctgcgattccagcggttcgaggtattcgagcatcagattgtggcggaattccatgagagaatagtacagatgaagatcctgatcttcttccaggcctgcaagctcttctttgatttctctccgcaagtactcggcgtccgggatgctgaaccttcgaatgtacatataccattcgttgattttttctccaaccgctgaagacgataaaacactcgccactattccgaatccctcccttccacgttatgtatatgacatattttatcattttcattcggaaggatagcgcaaaaataccgcaaacttttcccctttgacaaagccgtccgccgaaggaaccgcatttatcccgcagcctaggatttccggttttttcattttccttaaaaatcatgtttatcttcaaaaccaatcagcaaagatggtaagataggaggaagcggttgaactttttcccttgaaaacttatactattcaggttaagcgggatgatgaaaaggaagtgtcagcatgagacaggagacaccagtagccattcatgtgcaatcattcattcataacggctccgaagaagagtcggttgaatttacatcgagtggattctattacgtgagaaacggcaaaacgtatctttcctatcacgaagagcatgatttgggcaagattaaaacggtcgtcaagattacagaaaaagagattctcgtaatgagatcgggcgccatccaaatgaaacagcggttcattccgggggcatcgacactcactcaatataaactgccgttcggacaaatggagctccgtacggaaacgaaaaacattcaatctgatgtcggcggttcggaaggctccgtcaaactgacatataacatgactgtaggcgaaaaccaagaacatgtacataacatgacgatccaatataaggaggaaacaaaggcatgaatattgcggaacaaatgaaggacgtgctgaaggaagagatcaaagcggccgttctgaaagcgggcctggcggaagaaagccagattccaagcgtactgttagaaacgccgaaagacaaaacacacggtgattattccacaaacatggcgatgcagctggcgagaatcgcaaaaaaagcgccgcgccaaatcgctgaggagatcgtggcgtcatttgataaaggcaaagcttccattgaaaagatggatattgcggggcccggctttatcaacttttacatgaacaacagctacttaacaaaactgattccgtccgtgcttgaagcgggtgaacattacggagagacaaacatcggacaaggcgaaaagattcaggtcgaattcgtatcggccaacccgacgggagatcttcacttaggccatgcgcgcggcgcggcggtaggtgacgcgctgtgcagcgtgctttctaaagcgggctatgatgtgagccgtgaatactatattaatgatgcgggcaaccagattaacaacctggcgctttccgttgaagtccgttattttgaagcgctcggcctcgagaaaccgatgccggaagacggttaccgcggcgaggatattatagcaatcgggaaaaagcttgccgaagatttcggcgaccgtttcgtacatgaagaggagagcgaacgtcaggcgtttttccgtgaatacggcttaaagtacgagcttgataaacttcgctccgacctggaaaacttccgcgtgccgtttgacgtatggtattctgaaacgtcactgtacgaaaacggaaaaattgatcaggcgctcgaggcgcttcgcgaaaagggccatgtatacgaagaggacggcgcgacatggttccgctccacaacgttcggcgacgataaagaccgtgtgctgatcaaaaaagacggctcatacacttatctgctgccggatatcgcataccataaagacaaacttgaccgcggattcgacaagctcatcaatgtatggggcgcggatcaccacgggtatattccgcgtatgaaagcggcgattgaagcgctcggttacaagaaaggcacattggaagttgagatcattcagctcgttcatttatacaaaaacggcgaaaaaatgaagatgagcaaacgtacggggaaagccgtaacgatgcgcgacctgattgaagaagtcggcttggatgccgtgcgttatttcttcgcgatgcgcagcgctgatacgcatatggattttgacttggatcttgccgtatccacatctaatgaaaaccctgtgtattatgcgcaatacgcacatgcacgtatttgcagcatgcttcgccaaggggaggagcagggacttaaaccggcggcagatcttgatttcagccatattcaatcagaaaaagaatatgacctgctgaaaacaatcggcggcttccctgaagcagtggcagaagcggcagaaaaacgcattcctcaccgtgtcacaaactatatttatgatctggcttccgctctgcacagcttctacaatgcggagaaagtcatcgatccggaaaataaagagaagagccgcgcgcgtctcgctttaatgaaggcgacgcaaattacgctgaacaatgcgcttcagctgatcggcgtatccgctccggaaaaaatgtaatgatgatcaaaggacaaagtcttcgggctttgttcttttttttgcatataaagcgtgtgatgtaattcacaatccagcacactgagtttttgtatgataagactgatattgaatcagtgaaaggggcaagccgaatgatcaatcgtcaacatattcaattatcgctgcagtctttaagcttagtggcagggtttatggtgtgggtgctgatttcatcgctcatttctcaaatgacatcagatattcatttaagcaaaggcgagatttcattggtgacggcgattcccgttattctcggatcgcttctccgtattcctttaggatatttaacgaacaggtatggcgcgcggctgatgtttatgatcagcttcatcctgcttttgtttcccgtattttggatcagtatcgcggattctttatttgatttaatcacgggcggctttttcttagggatcggcggagcggtattctccatcggagtgacgtccctcccgaaatattatccgaaagaaaagcacggtgtcgtcaatgggatttacggtgccggaaacatcgggaccgccgttactacctttgcggcgccggttatcgctcaagccgcgggatggaaagcaaccgtgcagatgtatcttgttttgctggctgttttcgcattactgcacgttttgttcggcgaccggcatgagaagaaagtcaaagtttccataaagacacaaatgaaagccgtttaccgaaatcatgtgctgtggatgttgagcctgttttattttattacgttcggcgcctttgtcgcctttaccatctatcttccgaattttttggttgagcattttgggctgagccctgcggacgccggtctgcggacggccggctttattgcggtctctacgctgctcaggcctgtgggagggtttcttgcagataaactgagcccgctccgcattctgatgttcgttttcgcagggcttacgctgtcaggcgtcatgctgtcattctccccggcgatcggcctttatgcgttcggatcgctgacggtggcagtctgctcagggattggaaacgggacggtatttaaactggtgcctttctatttttcgaagcaagctgggattgccaacggtattgtgtctgccatgggcggactgggcggttttttccctccgctgattctggcaagtgtatttcaggcaacgggtcaatacgcgatcgggtttatggcgctttcagaggttgcgttagccagctttgtccttgtgatctggatgtattggcaggaaagaatgaaaacacatacggagagaaacagtcatagccttgattcataatgatccattcacaagattgttagttttttctgggtgagtgcaaatcaagtcacgttacaatatacatacgcaacgtgactttcttcgaggtgagctcatgaatattctctctgtccgaaaatctgataaagaacttctttcccgcgaactgcatgaattgctggaatcgatcagtacgaaaaggaaaatgaaaaaacacacgtatttgtttcaagaaggaatggatgcagaagagctttatctgattcaatcaggactcattgaaatcggcaagctgacatctgacggaaaagacctgacacttagaatctgccaaaaacacgatattgtcggagaattgacgctattcacagatgagccgagatatatgctcagtgcgaaagtgttagaggacggggaggtgctcgtcattaataaaaacaggctggaaaaggaattggtccaaaacggtgttttgacgtttgaatttatgaaatggatgagcacccatctgcgaaaaatccagtctaagatcagggatctgcttcttcacggcaaaaaaggggcgctctattccacccttatccgcttatcaaacagctacggggtggaacgaagcgacgggattctgattaacattgtgctgacaaatcaggatttggctaagttttgcgcggcggcaagggagagcgtcaaccgcatgctgggagacctccgcaaacaaggggttatttcgatagacgaaaccggaaaaattattttgcacaagcgggactatttacgatgcgagatcgagtgtgaaaattgtccgcttgagatctgcaatattgactgaaaaaacaagggcagccggtgtccttgtttttcagcttgtgatacatatacacatgacggcgaaaaagaagccggcatttacgatttccagaatgccgatcgttttcaccggccagtctcttccgtgaaaaaaccaggcccgcagactgcttgggataaaagcgagaaacgcccagcctgccccgagaagagccgataaaaaggggagcaagaggtgatatccccacgaccagtaagcaaaccttctgttttttctctcccgtatgaccgatttcacataaaaagaactcccgacaaaaaataaagcggattgcaagaatagaaaccaagcccagccgtcaaggattcccgttcccagccagcagctcgcaagcccgcctgaacaaaagaacaagactcccgcaatatcattcgtgagcgcccgttcgttttttcggcgggcataatgcgtatgtatgagaaacagcggcaataaaaaaacgccgatccagacgagctgcggcttatgaaagacagaaatgatcaaaaagcagcaggccggaaaaccgtaataccatatccacttttgataaggctgaagctgtttctttttcaaagcgagcgaaacgggataaaccgtcaagtaaaggaacagccagcccagaaagagcggaatatgccagaaaaccgggcctcccttgaccatgccgagtaaaaatggaatcagcagcatcgcccatgcgccgtgctgcttcggaatcatcgctttcatcgaaaccctcctttttatttcattataagtgcaaacactctcctgataagtgactttcatcatacaagctgtgaaatacatcactgccgcgcgggctcaatcgggctacactaaagctatcaatagcacaggaggctttcctatgaatcagtgtgactatttattatttctgaaacaacttcctatgtttaatgaagtgcctctgtccattgtcgaaaccttgctgaaaaacgggacgtttatccgcggctcatctgaccaatctccatcctttcttcattcacaatccgtttatattgtattaaaaggcaatatccgttttacggacagcaggctccctgaagggtcgcaaaccgttgcgctgtgggaaaaaggcgatgtgtttccgattgatgaaaaaggcgggctctctttatcgccttttatctcagtcaatgcctcaccggatattctggtactccatattccatattctatatttaagcaaatgatgtcttaccatccgcggctgcaaatgaactttttggcgatgcttcagcaaaatgtcttctgttcctatcagttgtttttgcggtatctgcatacatcactggatgaaaacgccgaacccggttcttaaacagaaccggtttttttgatgacgcgggcgtcctcatatcgtttaaaaatccttcctgctgctctgtgtgaacgttttgtgaaaaaagcagagtgtgtgacttagttcacaaggtgatgcgccgtctctgtttatagtgtacatagcatcacctgactcggaaggagtgaacgatcatgaagaaaaagaaaatgagtccgttgctcaggagattaaactatttttctcctatcgaacatcattcaaataaacatagccaaacgacaagcgaagatcgtgattgggagaatgtatacagaaacagatggcagtacgacaaagtcgttcgctccacccacggcgtcaactgcacgggttcttgcagctggaatatttatgtgaaaaacggaattgtcacgtgggaaggacaaaacttgaattatccatcaacaggaccggatatgcctgatttcgaaccgagaggctgtccgcgggggccagtttttcatggtacatctacagcccgctccgtgtgaaatatccatatgtgcgaggtgtgctgatcaatttgtggcgggaagcattgcagacgcatcaaaatccgctggatgcctggaaatcgatcgttgaaaaccctgaaaaagcgaagtcctataaacaggcaagagggaaaggcggctttgtccgcgcggaatggccggaagtgctgaagctgatttcagcctctctgctgtatacagtgatgaaatacgggcctgaccggaatgtcggtttttctccgatcccggcgatgtccatgatcagccacgcgtcaggttcgcgattcatgtctttaatcggcggcccaatgctcagtttttatgactggtatgcggatctcccgccggcgtccccgcaaatttggggtgaccagacggacgttccggaaagcagtgattggtacaattcaggctacatcatcacatggggttccaacgttccgttaacgagaacgcctgacgcgcactttttggcggaggcccgctataaaggggccaaggtgatttcaatcagtcccgattttgcggaatcctcaaagtttgcggatgactggctcagtatccgccaagggactgacggagccctggcgatggcgatgggtcacgtcattctgcaggaattttacgtgaatcaagagacggaacgtttcatggaatacgcgaagcaatacacggattttccattcctcgtcaccttatcaaaagaaaatggcgtatacacagcgggacggtttctgcatgcgaaggatatcggacggcagacaaagcatgatcaatggaagccggcggtctggaatgaacagacaggtgcgtttgccataccgcaaggaacaatgggctcccgctgggacgggcagcagaaatggaatctgcacatgatcgatgaagacaccggggaacagatcgagccccgtctctccgtgctcggaatagaggacgaaatcagtacggtgcgcattccgtatttttcaaatgacggaaacaaagtgcttgagcggaatcttcctattaaaaaactggaactgaacggtgaagaggtgtgtgtcacgactgtatttgacttgatattggccaactacggcgtgaaccggggcatcggcggacaatcagccgcatcttatgatgatccccgtccgttcacacctgcctggcaggaacagatcacgggaattaaaagagaagccgttatacagattgccagggagtttgcccaaaatgcgattgatacagacggcagatcgatgattatcgtagggcgggaatcaaccactggttcaactccgacacgatttaccgcgcggtgttaaatcttgttttattggtaggcgcccaaggcgtaaacggcggaggctgggctcattatgtcggtcaggaaaagctccgtcctgctgaagggtggcagacgatcgcaaccgcaaaggactgggaaggcgtgcctaaactgcaaaacggcacctcatttttctactttgcgacagaccagtggcgttacgaagaccagccgatcagtgacttggcttcaccgatcgcttcttcatcccgctacaagcatcacgccgattacaatgtgctggcggcgcgattagggtggctgccgtcctacccgacattcaatcaaaacggcattgatctgtacaaagaagctgagaaggcgggggcggcgacacctgaagacgtaggtgcgtacgtggcctcacagcttcaggagaaaaaactgaaattcgcgattgaagacccggacaatgaagtgaatttcccaaggaatctctttgtatggcgggcaaatctgatctcaagctcaggaaaagggcatgaatattttcttaagcatctgctggggacgacgaacggtttgatgaatgacgacagcgacagcatccgccctgaagaaatcaaatggcgggagcaggcgccggaaggcaagctcgacttgttaatcaatctcgactttcgaatggccggtacggcgctgtattccgatatcgtgctgccggcagcgacatggtatgaaaaacacgatctcagcagcacggatatgcacccgttcattcatccattcgctccggcgatctcggcgccgtgggaatcgaggtcagactgggatattttcaaagcactgtcaaaagccgtttccgacctggcggaagaagtcgatatggagctggtgaaagaggtagtcgcgacgccgctcctccacgacacgatgcaggaattggcccagccgttcggaaaaatcaatgactggagcaagggcgaatgtgaagccattccgggaaaaacgatgccgaatatccaagtcgctgaacgggattacaaacacatttttcataaaatgaccgcgctcggccctcatacggctttaaaaccgagcggaacaaaagggatgagctggtcgattgcggatgaatatgaatcactcaaaaagagactgggagaaaccgattcagacggcgttgccaaaggatgcccgaatataagtgaagcaaagcaggcggcagaagcgattttaaccctgtcgtccacctcaaatggaaaggtcgccgtaaaagcatgggaatcgcttgaaaacatcacaaacctgaagctgaaagacctggcggaagaacgcgaggaagaatgctttacgttcgagcaaattacagcccagccgaaaacggtcatcacgtctccggcctttaccggctcagaaaaaggagggcgcaggtactcgccgtttacgacgaatgtggaaaaattaatcccgtggaggacactgaccggcagacaatcctattatgtcgatcatgaactgatgatggaattcggtgaaacgatggcgacatttaaaccgatcctccagcaccgtccgttcctgagcaagcggcctgatcaagagggcaaagagatcgttcttaattatttgacgccgcataataaatggtccgtccacagcatgtattttgattccctgccgatgctgacgctgttccggggcgggccgaccgtgtggatgaataaagatgacgcaaaggacacggatatcaaagacaacgattggattgaatgcttcaaccgaaacggcgttgtcgtggcgagagcggttttgtctcaccggattcctaaaggaatggcgtttatgcaccatgcccaggaccgccacatcaacgtgcccggcacaaaactgacgaataaccgcggaggcacccataacagcccgacaaggattcacgtcaagccgacccagatgatcgggggctacgcacagctcagctacggctttaactattacggtccgacggggaatcagcgcgatctgaatgtcgtcatccgcaagctgaaggaggtcgattggcttgaagattaaagcgcagatcggaatggtcatgaacttggataaatgcatcggctgccacacgtgcagcgtcacctgtaaaaacacgtggacaaaccgttccggtgcggaatatatgtacttcaataatgttgaaacaaagcccggtatcggctacccgaagcaatgggaggaccaggacaaatataaaggcggctggacgttgaaaaaaggaaagcttgaactgaaatcaggcccgaaaacaaaccggcttgcaggccttttctataacccgaaccagccgacgattgatgattactatgaaccttggaactatgattatgaaacattaacaaacagcccgcagaaaaagcaccagccggtggcgcggccgaaatcgtccttgacgggcgattttatgaatatcgaatggggcccgaactgggaggatgatctcgctggcggccacattacgggtcttgaagatccaaacgtgcaaaagatggaggaatcgatcaaaacagaattcgatgaagtctttatgatgtatctgccgcgtatttgtgagcactgcatcaatccggcgtgcgtgtcctcctgcccgtccggcgccatgtacaaacgcgaggaagacggcatcgttctcgttgatcaaaacgcatgccgttcatggagatattgcgtctcatcctgtccttataaaaaagtctattttaactggcaaacgaacaaagcggaaaaatgcacactctgctttccgcgcttggaggcggggctgccgaccatctgctccgaaacgtgtgtaggcagaatccgctatctcggcgtcatgctgtacgacgcggacaaagtggaggaagcggcctccattgaaaatgaaaaggatctctaccattcccaattagacgtttttcttgatccgaatgatcctgaagttgccaaactggcaaaagaacaaggcatcccggctgaatggatagaggccgcgcagcaatcgccgatctacaaaatgatcatcgattggaagattgcgctgccgcttcatcctgagtaccgcacactgccgatggtttggtacattccgccgctgagcccgattatgaatctctttgaaggaaaaggcagccggcaaacggcggaagatatttttccggctatcgaccaaatgagaattccgattgactatttggcccagttattaacagccggtgatacggatcatattcggtcaacgttaaagaaaatgtctgtcatgcgccagtatatgagagcagtccagacgaataaatccatcgacccggcactgatctccagtgtcggcttaacagaaaagcaaattgaagacatgtatcggctgctggcgatcgccaaatatgatgaccgctttgtgatcccgagcagccatcgagaagaagtgtctgatttatacgctgaacaaggaagctgcggcttgtcattttcaggcggccccggctcttgtttctaacttttgataaatgaggtggaacaagatgaacaccacagaccggcaaatgacattctccgctctttccattcttctctcttatccggatgaagagtggagagccgggcttcccgattggaaggctcttatccatgaaatcggcattcagcaaatccgtgagaaactgctgcactttttagaggcggcagccggcttttctccgcaagcgctgattgaacactatgtgtatacgttcgacttcgggaaaaaaacgaatatgtacgtcacctactttaactcaggcgagcaaagggagcgcggaattgaactgctgcatttaaaaaacacctaccagcaatccggtttcctgccgacagagaaagaattgcctgattatctgccgctgatgctggaattcgccgcggttgcggagattgaagcggcgagaagcgtgtttgagaaatacctgtccaatgtgagggagctggcttcccgcctcgaaaaaaatgacagcctctatgctgagctgctgcacgtgctgcaggccgcgctggaaagcatcggtgtacgtgaaagcactgaagaaggggctgctcaggcatgagcgggcagatcctgtgggggattatgccgtacatggtattgacgatctttatcggcgggcatatttaccgctatcagcatgaccagtttggctggacggcgaaatcaagcgagctgttagaaaagaaaaaacttgcggcgggcagcacactttttcactggggactgctgttcgttgtcggcggacatgtcatgggaattctgatcccggaaggcgtgtatactgtactgggcatttcagagcatacgtatcacaaaatggcgatcggcgcaggcctgccggctgggatcgcggcttgtgccggactagtgatcctgacatacagaaggctgtttgacaaaagaatccgcaaaaccagctcgccatcggatatcctgacgcttattctgctgctgttcatgatgctgtcgggcgttgcggccacgtttctcaacattgactcgaaaggatttgattacagggcaacagtcgggccgtggttcagggaaattgttttgttccggcctgacgcttctttgatggagagtgtcccgctatggtttaagtttcatatcatcatagggtacgtcgtttttatcctttggccgtttacaagattggttcacgtgttcagcctgcccctcaagtatttgacccgcagctatgttgtctatcggaaacgcacgtaaaaatccccctgcaagagggggatttttttatggtgaaaaaataaaaacataagatattttctgccaaggtaatggctgggcggcggggattcctgttatgttttatgtggaaataatatcaacaaaaggagagtgaagaatgaagcggattttcctcattttagccgcctgtctgatgacaagcgccggcgtcctgacactcagacattctcatgtattaaccggcggcacagcgggactgtcactaagcctgtcgtacttgtttcattcctcatttgcgattatcttctttctgatcaatatcccgttttatatattttctctcatcagaatgggaatcaaattcactctatccaccgtttttgcagtcactgtgctgactctgtttaccggcgcggatcactggctgccgccggtctctgtttcaccgcttgccggggcgatttgcggcggggcgctgatcgggttcggcctgtcgctcatgttttatcatcaggcatcgctcggcggcgccaatatcctcgctttatttctgcaaaagcgctgcggatggaatccgggtgccgttaatttcctcttcgattttggcgtcgtgctggccggcattttttccgtcggattgctgaaagggctcttctccttagtgtcgatagcggtcaccggtctgatcatcggcatcttcaaaaataaaatcaaaggcagctgctcgctcaatccggcattgcttcagaacatcacaaccggccagtcacaggaagtgtcatcataatcctttccgctcgtgcggagaggatttttcatatgtttacaggccggaaaacagagggtatacagagatatcggatcagatgggagagagtcgggatgctgaaaaggagactggaattttgctttttatatatgatgcttatcggagcatatgtcatatggttttttccggtttccaggcttgagttttacggagggttgctttgctatgcaagcattattttgttcagcatctattcgttaattcttgaaaaccgcacctctcagcacacgctgttatggattcatattcttgtgttttttccgatcgccgggtacttattttaccttttttccggccagctttatgaaaaaggcaagctgttcaggtcgaaacggacatacaaccgggaaaagctgagaacgatatttgatatggaacagacgcccgatctgtccgggctgaaaggaaatcagaagcgtttctttcaatattcaatcaaggcgtctcatatgaatatcaatacaaaaagcaggctgaaggtgctcaaaaacggggatgaaacatttccggagctgtttgaagcgctccggtcggcagcatcatttatacatattgagtattacatgttcaaatcagacatgcttgggcacaagatgatggacattatgatggaaaaagcgcgtcaaggcgtggaagtgcggtttttgttcgacgcggccggcagcctgaagctggccggaaaagacattaaaaaactgaaacgcgcgggcgtgaacatcgtcccgtttctgccgctgaaatacggttttttcaaccaaaagttcaatttcagaaatcaccgcaagatcgtcatcgttgacgggaaaaccggttttgtcggcgggctgaatgtcggcaaggagtatatcggcaaagaccaaagtgtcggtttttggcgggacacccatatgaaagtcgaaggagaaatcgttcagacgctccacagcatttttatgcttgattgggaatacgtttcggatgaggtgctgattgatcagaaagcatacagccgcccggtccctgcagaaagcggcggcgtctatcaagtcgttccgacgggccccgatatgaaggagcggatgagcgatctgtattatgccatgatagcggcggccgaatcatctgtatggatcgcgacgccttatttcgtgccgaatgagccgatccgcacagcgctaaaggaggctgctgccagaggcgtccgggtgcgagtcatggtgccggaaaccaatgacggatttttaacccagtacgcgacgagatcgtatttccccgagcttcttcgcgaaggaatcgaagtctattcctatcaaaaaggctttatgcatcaaaaggtgctcatcactgacggaaacctcgcctctgtcgggacggcgaacatggacatgagaagctttcagctgaactttgaggtcaatgtcttttttacagatcaaaaggcgatcaaagatcttgaagcgcattatctggaggatatgagagagtctgagaaaatcagccccgtccgtttctataagcgcacattatgggaaagaacgaaggaatccttcgcgcggttattttccggcgttttataaaaaacgcttttaaaactccttgtgtatagtataattgagaaatattatcattaggaacgaggcacaaggaggacggaaacgtgctgcgacaatttttttcttattataaaccgtacaagaagctgttttttctcgacttcttttctgccatcgccggcggattgatggagctgagttttcctctgattgttaattactttatcgatacattgctcccgggcgggattggcgtctgattattttgacttccgctgctttattcggagtctacgccctcagctcggcgcttcagtatgttgtgacgtattggggccatatgctcggcattaacattgaaaccgatatgcgtaaaaagctttttgaccatctgcaaaagctttcgttcaaattttacgataacaacaaaacgggcagtttaatgtccaagctcaccaatgatttgatgtatatcggagaaaccgcccaccacgggcctgaagacctgtttatcgcggtcatgacgattttgggcgcgttcggtgtgatgctgttcattaactggcagctcgcgctgttgacctttatcattatgccggtcgtcatttggcttgctttgtatttcaataaaaaaatgacctctgcgtttacaaaactgaacaaagacgtcggagacttcagcgcgagggtcgaaaacaatatcggcggcatccgtcttgttcaggctttcagcaatgaagcgtttgaaacgcagcggtttgacgtgaacaatcagcgtttccgcaaaacaaagctgacgtcatataaaatcatggcgaaaaacggctcgatcagttacatgctgacaagattcgtcacgctgttcgtcctgttgtgcgggacatggttcgtgatccgcggatcgttatcttacggggaattcgtcgcttttgtgctgctgacgaacgttctgttccgtccgattgataaaatcaacgcaattattgagctgtatccgagaggcatagccggttttaaaagctttatagaaataatggaaacggagcctgatatcaaggacgccccgaacgcgagacatgtgtccggtttaaaagggaatatccgttatgatggtgtgtcattcggttacgaagaaaacagcccggttctgtcgggaatcaatttgtccattcatgcaggggagacagtcgcattcgttgggccttcgggagccggaaaatcaacgctgacaagtctgctgccgcgtttttatgatccgtctgaaggcgtgatttccatcgatggaattgatattaaggacatgacgctgtcatcattgcgcggacaaatcggcgtcgtccagcaggatgtctttctgttttccggcacattgcgggaaaacattgcgtacgggcggctcgatgcgtctgaggaagaaatccggcaggccgtccgccaggcgcatttagaggagctggtaaacgggtatcccgacggtttaaacacggtgatcggcgagcgcggcgtgaagctgtcaggcgggcagaagcagcggctttccatcgccagaatgtttttgaaaaacccgtcgatcttaattttagacgaggctacatcagccctcgatacagaaacggaagccgccattcaaaaatcgctgcaagagctgtctgaaggacgcacgacgcttgtgatcgcccatcggctggctacgattaaggatgcggacaggatcgtcgtcgtcacgaaagaaggcatcgctgaacaaggtcatcataaggaactgctggcatccggcggcatataccagagactccatcaggcccaattcggcgagctgatacatgaataatggaaaaaggatagacgagcgggggccgggcagcctcctgtctatccttttttttatgtagtccgtatttaatgggcttctttttgcgcaggttcgatgatatgtttgaaacggtcaacaagctgcaccgctttctttccttccactacaattaaatattcttgttctttatgagccattctgaacgtttccagctcaatgatatctttgattttgcacattgtttttttagagtagatatacagctcgtggcctcccgtgtggcaaagctgataaagctgaagcatgtttcttaaagtgaacttcttagcggctattttcaaagatgtaatgtttttcatgtgttttctcctccgtctgatggtctgttatttcggaaattccccatatgaacgggtgataaacctggttatgccttccacctcagcactccgcccgccaggcgtttaactccgcggatggcgcttaattcttcgacgagccggagcagcgcccggtctttctctttcgcctcaatcataaaatcgatgcccgcatcccattgtctgaaccgctccagcaccggcagaataaaattcgcgtccacatagtccgcatgactgcgtacggctgattctgattttggcgaggagagatggaccttcggctttaagccgatccgctgccatgttttgatcatccgcggaagaatgtcatctaaatcagcgtcatcggccggattggcgtaaaaatggtgataatcaaacacaaacggaatgccttcttgctcacatacactgagtgtttcctcggacgtatatgttttatcatcgttttctaaagtcatccgctgtttgatgacttcgggaagttctttcagattcacgcggaaacggccaagcgcgctttgtttgtcaccgtaagcgcctccgacatggatgttgatgacggaacggtccgcgatgcccattgcgtccagcatgtcataatgataggccatatccttgaccgcatttgcggtaatctcccgtttcgggcttgtaaaaagcgtgaattggttcggatgaaagctcgttctgaggtcatattttctgaccagcccgccgatctcacgaaactcctggcgaaacggcgtgacaaaatcccacagtacatccgggtgcgtggcgagcggcacaattgagcttgagaacctgtacaaagggatgccgtggccgaccacatagtggagggtgcgcagcgtattggtaagatttgctttcgtcacagaaagcagagcgtctttccgctcactgcgggaaagcttggtatagcgcgcatatgttaaggttttggcgggggacgcgtcccaaaggcacatggcgtttgcgacgaatccgaatctgaacagcatatggtttctcctttataaaaagtaagatatggcctttcccagccattctgcaggaagctgtctgacggagcgctgtttcactttttctaatgtgagaagctcggatttttcgatgtcctgctttatggttgaaagcacttcctttgtaaaggcctcatcatgaatgatgacatttacctcttcattccagaacaggctccgtttatcaaaattcggcgtgccgataatgctgatgcggtcatctataatgaaggctttaacatgataaaagccttgataataccgatagatgaggcagccggccttcaggagctcgggataataggtaaaagctgtttcccgaacgagcgggtgatctgatttcatcggaacgatcaagatgactttgacgccttttcggcaggctgaaataagcgcttcctgaagctttttgctcggtacataataaggcgtgccgatgatgatttttttctccgccttacggatgcagttttcataatgcgattcaagcgaaaaaccgtcagatgcatatgtcctatgagagatattcccttcggataatgccggataaaccccgggtgattcgggtgtttttccggtgtttcgtttcaggtcgcttacaaaaagagtctgaagatctgccgtgccttcgccggtcatccgcaggtgataatcctcccagtttccgaacttcgctttttttccgaggtactcttcagcgatattaaagccgcccacatagccgattttgccgtcaatgacggtcactttccggtgattccgtttttgcagcctgaaaaaaagaaagggaaatgccggtttatttagaaaatgaacgtgaacgccggcttttttcatcgtttgaatggaaggctttttcacttggcggctgcccgcccaatcgagcagcagatatacggagacgccggcccgggccttttctttcaataaatcaaacatctcatggctgacttggtcgttcttcataataaaaaacatcatatgaatagaagagacggcttggcggatatcagccgtcatctgctgcacaagctcgctgccgcagtgaatgagtgtgatatcactttttttggggtcaaaaacgggctcatacgcctgttttttgtacgccgcccggccaagcagcatatcaagcagcataagtgcgatcaatatgataaaaatgacaagcaacacaaaaatgaccttcataccgacgctcctttccgaagtatccgtagtgtgccctgagaatgtgaatttaattattgactgaacactcattcattatttatgataaagtaaagatatgacaatgaagaggggaatcagaacaaagggggagacaagatgaacgcatttctcatggtaaacgcgctgctgttttcagctgtaaccgcttacgccgtttatttattcgtttacctgatcagaacgaggatcgcttatattaagctcggccaaagggaagaatttgataaacgcctgaaagaacgtcttcagaagatatgggtgaatgtgttcggacagaaaaaattgctgaaagataaaaagagcggaatcatccacgttctgtttttttacggttttatactcgttcagttcggcgcaattgattttattctgaaagggctgcttcctgaccggcatctgccgttcggcccgctttatccggcatttaccttttttcaggaaatcgtcacgtttctgattttaatcgccgtagtctgggcgttttaccggcgctacattgaaaagctcgtcagattgaaacgcgggtttaaagcggggcttgtcctgctgtttatcggcggactgatggtgacggtgctgctcgggaacgccatgaaccttttatggcacgatcattctctgtcttggacggaaccgatcgcttcctccattgcgtttgtgctcggcggtctttcagcgccggcggccgccgccgtgttttatgtttcatggtggcttcatctgttgtttttgctcagctttttagtgtacgtgccgcaatcaaagcatgcgcacttaattgcgggtccggcgaatgtgttcctcagcaggctggattcaaaaggaaagctggaaaaaatcgattttaccgatgagacgaaagaaagctacggcgtcggaaagattgaagacttccgccgctctcagcttgtcgacctttacgcctgcgtcgaatgcggccgctgtacaaatatgtgtccggcctccggtacgggcaagatgctctcgccgatggacctcattttaaagctcagagaccatttgacggaaaaaggcgctgccgtgacatcaaaatctccgtgggtgcccgcgcccgtttttcagcacacgaaggcgaatcagctcgccgcggcttcctcagggggaggatcgcgtgaagcggcggcagccattgattacaacccgagcttaatcggcgaggtcatcacggaagaggagatttgggcgtgcaccacttgccgcaactgtgaagatcaatgtccggtcatgaatgaacacgttgataaaattatcgatctgcgccgctatcttgtgcttacggaagggaagatggacagcgacgcgcagcgggccatgacaagcattgaaagacagggaaacccgtggggcttaaaccggaaagagcgggagaactggcgggagcaggctgatacagagattccgacagtgaaagaaatgaaaaaacaagacaaagagttcgactatttgttttgggtcggctcaatgggttcctacgacaacaggagccaaaagattgccgtttcatttgcaaagctgctcaatgaagcgggcgtatcctttgcgattctcggcaataaggaaaaaaactcaggcgatacgccgcgccgtttgggcaacgagtttctgttccaagagctggcggaacacaacatcggcgaatttgaaaaacacggaatcaaaaaaatcgtcacaattgatccgcacgcctataatatgttcaaaaatgaataccctgatttcggattccgggccgaagtctatcatcatactgaattattagccgagcttgtgtcacaggggaaactaaaaccgcttcacccggtcaatgaaacgattaccttccatgactcgtgctatttaggaagatacaacgaagtgtatgagccgccgagagcgatcttaaaagccattccgggcgttcaattgaaggaaatggagcgcagccgcgaaaacgggatgtgctgcggcgccgggggagggctcatgtggatggaagaagaaacgggagcgaggatcaacacggcccggactgagcaggcgctttctgtcagtccgacggtcatcagctccggatgtccttactgtctgaccatgctcggtgacgggacgaaagcgaaagaagccgaagacgcgatcggcacttatgatgtcagtgaattgctcgccatgtctgtattcggcgccgaaaaacaagagtctttatagaaagaagcgggccgccggcgcatatgccggcggctttgttttcgcacatcagccgatttatgaaggggcggctctaaaatttcttaaattacgctgtttagggtagcatattctgttttaatttgtttataatgagaggtatggtttatgaacaaaacaatacaaattcgttcttattataggatagaaacagatacatataagtaatagaaagggagtgtccgaccttgagtatcaaacaatattctcaggaacagctgaagcagatggctttagttgaaatcgctcacgaaattttctcagaacataaaaaaccggttccgttccaggagctgctgaatgaaatgatctccttactcggtgttacgaaagaggaactgggcgaccgtatcgcccaattttatacagacctcaacattgacggccgctttattgctctgtcagatcagacatgggggctccgcagctggtatccgtacgatcagctggacgaagaaacacagccgactgtaaaagcgaaaaagaaaaaagcgaaaaaagccgttgaggaagatctcgaccttgatgaattcgaggaagttgatgaagatgacatcgatctcgatgaaatggaagaagatattgaccttgacgcagacagctttgacgacgaagatatcgatgaagaagatgacgacgagcttgagattgaagatgagatgattgaagaagatgaggaagattatgatgatgaggaagaggatcgcaaagactgattttatatcagcaaaacgatcttgactttcattgtcgaactatgtagtatgtattttgggctcttcaaaaagaagagaattcataagagtgctacgctccctttcaagaaattgaaagggagctttcttattttcatctcccaaattcttttacacatcatttgtttttagtgaaatgattttctataaaacggcacattttaaggaatgtagcgcagaccgaagagaggagcaaacgaaatgacgaaatatatttttgtaaccgggggagttgtatcatcactcggaaaaggaattgtggcagcatcacttggccgccttttgaaaaacagaggcatgagcgtcaccatccaaaaatttgacccttatatcaacgttgacccgggaacgatgagcccgtaccagcacggtgaggtattcgttaccgatgacggcgctgagactgaccttgacttagggcattatgagcggttcattgacattaatctgaacagattcagcaacgtgacgacaggtaaaatctattctgccgtattgaaaaaagagcgccgcggggactacctcggcggaacggttcaggtcattccgcacatcacaaatgaactgaaagaccgtgtgtaccgtgcaggcaaagaaacaaacgcagatgtagtcattactgagatcggcggaacagtgggagacatcgaatctcttccgttccttgaagccatccgtcaaatgaaaagcgacatcggccatgaaaacgtgatgtacattcactgtacgcttgttccgtacatcaaagcggcgggcgagctgaaaacaaaaccgacgcagcacagcgtaaaagagctgagaagcctcggtattcagcctaatatcatcgttgtgcgcacggaaatgccgatttctcaagatatgaaagataaaattgcgctcttctgcgatattgacacgaaagcggtcatcgagtgtgaagatgcggacaacctttactccatcccgcttaaccttcaggagcagggactcgataagcttgtctgcgatcatatgaaattagaatgcaaagacccggatatgacggaatggaaagaccttgtcacgaaagtgaaaaacttgtctaaaaccattacaatcagccttgtcggtaaatacgtcgagcttcaggacgcttacatttcagtcgttgaatcactgcgccacgcgggctatgcgtttgacgctgatgtgaagatcaaatggattaacgccgaagaagtgacagaaagcaatattcaagagctgactggcggcacagacggaatcatcgtgcccggcggtttcggggaccgcggcgtagaagggaaaatcatcgccgccaagtatgcgcgtgagaataaaattccgttcttcggcatctgcctcgggatgcagattgcatccattgaatatgcgcgaaacgtattaggtctggaaggggctcactctgcggagatcgatccgtccactccttatccgatcatcgaccttctgccagaacaaaaagatgtcgaggatcttggaggaacgcttcgtctcggactgtacccttgtaagcttcaggaagacacgaaagccttcgaagcgtattcggatgaagtggtatacgaacgccaccgccaccgttatgaattcaacaacgaatacagacagcaaatggaagagaacggttttgtgttctcaggaacaagccctgacggccgtcttgtggaaatcatcgagctgaaagaccatccttggtatgtcgcttgccagttccaccctgagttcaaatcaagaccgacaagacctcagcctttattcaaagactttatcggcgcttccgtacaagctgcagaacagaagtaataaaaaaagacttgcctcctttaaaagcggcaagtcttttttctgcatcaggcatattcctgcatcatttcctttaacgtaaaggacagcgcgtgatagacatacaggcctgtcattaatgaaggaaagccgtatcttgtcccgtcttcatcgggcagaagcggcatttttaatttgctgtcaatatgaacatcacaaaattcctcaatcccggtttgatctttgatgacaggagatacgcaaacgaggccgacccctttttcataaagcttttgagccagcgcctgttcttcagccgtgcccggacctgaacaaaacatcagcaccctgtcgctttctgtaatcgaatcagctgtatccggaaacgctttgacagaaggcatcggttctgagccgagttccgcctcgcacaaaatgccctgcatctcatttgcgccgtataaataaatggtatgaccgctgacggctgcctgcgccagcaggcgcgcgccgtcttctattgcatcggactccttatcctgaatgcgggaaaaaatgcctgcaagctgcgtcgtaaatatctttaacatgagtgaaacctcctttacacatacaagaacagtatacaacaaaagagaaaatgctcagaaaatgtcggaaagtagactattataattaaaggaaatgtgaaaatcaaacagaatacataaacaactgcttccttttgacgaaaatgataatattggggtgtaaaatgatgaatgaaaagattttaatcgtagatgaccaatacggtatacgcatattgctcaatgaagtgttccataaagaagggtaccagacgtttcaggccgccaacggcatacaggcgctggacatcgtaacgaaagaacggcccgatctcgtgcttttagatatgaaaatccccggcatggacggaatcgaaattctcaagcgcatgaagatgatcgacgaatccatccgcgtcattatcatgaccgcttacggagaactcgatatgattaaggaatcaaaagagctcggagcgctgactcattttgcgaaaccttttgacattgatgagatcagagacgcggtgaaaaaatatttacctctaaaatcgaattaataaaattagaaacaattatgtcattgtgttgccgatttgtcgaaaagttggtatcctagagatggagaaaaagcgatctgttgttttacatatgacaggtttttatggtcatgctataggtggaaagcttttttcgagaagaagcaaatcaggctacataaggaggactttcgacatgcctttagtttcaatgacggaaatgttgaatacagctaaagaaaaaggatatgctgttggacaatttaacttaaataaccttgagttcactcaagctattttacaagcagcagaagaggaaaaatccccggttattcttggtgtttcagaaggcgcgggacgctacatgggcggcttcaaaacagtggttgccatggttaaagctcttatggaagaatacaaagtgacagttcctgtcgcgattcacttagaccacggttcaagctttgaatcttgtgcgaaagcgattcatgcaggtttcacttctgtaatgatcgacgcatctcaccatccgtttgaggaaaacgtagcaactacagctaaagtggttgagcttgctcatttccacggcgtttcagttgaagctgagcttggaactgtaggcggacaggaagatgacgtgatcgctgaaggcgtaatctatgctgaccctaaagagtgtcaagaacttgtagagcgcactggcatcgactgccttgcacctgcactgggttctgttcacggcccttacaaaggcgaaccgaacctcggtttcaaagaaatggaagatatcggcaaatcaaccggccttccgttagtacttcacggcggtacaggaattccgactgccgacattaaaaaatcaatctcacttggtacggctaaaatcaacgtaaacactgaaaaccaaatttcttctgcaaaagctgtccgcgaaacattggcagctaagccgaacgaatacgatcctcgtaaatatcttggacctgctcgtgaagcgatcaaagaaacggttatcggcaaaatgcgtgagttcggttcttcaaaccaagcttaatccaatgtaacatccataaaccgcctgacagcattgacaggcggttttatgtcttacctttagaaagcgcaatcatgttttacagttctgaaaatttattactggggaggctttccttatgttatttttcattgatacagcaaacattgacgagattaaagaagcttatgaacttggcgttcttgccggagttacgacaaaccctagtttagtggcgaaagaagctgacgtgtctttccatgacagacttcgtgagattacggaagtcgtgagcggatcagtaagcgcggaagtcatttccctgaatgctgaagaaatgattgaagaaggtaaagaacttgcgaaaatcgcgccgaatattacggtgaaaatcccgatgacgtctgaagggttaaaagccgtaaaagcgctgagcgacctgaacattaaaacaaacgtaacgctcattttcagcgccaaccaggcgcttttggcggcaagagccggggcgacttatgtatctccgttcttaggccgtctggatgacatcggccataacggtcttgaactgatttcagaaataagacagatttttgacattcatgacattgatactcaaatcatcgcagcttccatccgtcatgcgcagcacgtgactgaagccgctttacgcggtgcgcatatcggtacgatgccgctgaaagtcattcaccagctgacgaaacatccgttaacggataaaggcatcgagcaattcttggctgactggaataaataagggggaaaagggcggcaaaccggttgcatccgtttgccgcacccttatgttttcctgtttggcagcgggccttcagtatcaaagtgaagagtgtgtttccccggaatatgaacccggcgggcctctgtgcatcctgtgttaaaaatgccccgcaaagcttcgctattttcttcctgttattttataatgtccttgtattctttctcttcgaattggctacattttggacaagagctttatttgcagagacagaataaaatgccattttatttacgctccgcagctatcttcttatggaaggagactatcatggaaaagttgaatattgccggcggcgatccgttaaacggaaccgtacatatcagcggtgcgaaaaacagcgccgtcgcattgatacccgcaaccattctggcaaattccgaagtaacgatcgaagggcttccggagatctcagatattgaaacgctgcgtgacctgctgaaagaaatcggcggaaacgtccattttgaaaaaggagaaatggtcgttgacccttccccgatgatcagcatgccgcttcccaacggcaaagtgaaaaaactccgcgcttcctattacttaatgggcgcgatgctcggccgcttcaaacaggcggtcatcggactgccgggcggatgccatctcggtccgcggccgattgaccagcatatcaaagggtttgaggcgcttggagcggaagtcaccaatgaacaaggcgcgatttatctgcgcgccgaaaggctgagaggcgcacggatttatttagatgtcgtcagcgtcggagcgacgattaatatcatgcttgccgctgtactggctgaaggtaaaaccgtgatagaaaacgccgccaaggaacctgagattattgatgttgccacattgctcaccagcatgggcgcaaagatcaaaggtgcgggaaccaatgtaatcagaatcgacggcgtaaaagagctgcacggatgcaggcatacgatcattccggacagaattgaggcgggcacctttatgatcgccggcgccgcgatggggaaagaagtcattattgataatgtcataccgactcacctggagtctttaacggcgaagctcagggaaatgggtttttacattgagacgagtgacgatcagcttcttatgctcggcgggcagaagcagataaaaccggtcgacgtgaaaacgcttgtttacccgggattcccgactgatcttcagcagccgatgacatctctgttaacgagagccagcggcacgagcgtcgtaaccgacaccatctactcggcccgatttaaacatattgatgagctgagacggatgggggccaatatgaaagtggaaggcaggtcggccattatcaccggtccggccgagcttcagggcgcaaaagtaaaggcgagcgatctgcgtgcaggcgcttgtctggtcgtcgccgggctcatggctgacggcgtaaccgaaattaccggtcttgagcatttagaccgcggctacagcaatcttgagaaaaaactcgaaggtctgggcgccacaatctggcggcaaaggctgacggacgaagagatagaacagctccaaaattcatagaaatgcggacttttgagaggagatcgtgttgaaatggaaagaagcttatcgatggaattggttcgagtcactgaagcggcggctttagcatctgccagatggatgggccgcgggaaaaaagatgaagctgatgatgcggcgacaagcgcaatgcgtgacgtgtttgacacggtgccgatgaaaggcacggtcgtgatcggggaaggcgagatggatgaagcgccgatgctttacatcggcgaaaagcttggaaacggatacggcccgcgcgtcgatgtcgccgtcgatcctcttgaaggcacaaacatcgtagcgagcggcggctggaatgcgctgacggtgatcgcggtcgccgaccatggaacattgctgaacgccccggatatgtatatggaaaaaatcgcggtcggtcccgaagcggtaggctgcatcgatatcgaagcgcctgtcattgataacttaaaagccgttgcgaaagcgaaaaacaaagacattgaagatgtcgtggcaaccattttaaatcgtgacagacacgaaaaaatcatctctgaattgcgtgaggcgggcgccagaatcaaactgatcaacgacggtgatgtcgcgggcgccatcaatacggcctttgaccatacgggagtagacattctcttcggttcaggcggggctcctgaaggcgtgctgtctgccgttgcgttaaaagcgctcggcggcgaaatcatcggcaggcttctgccgcaaagtgcggaagagcaggcccgctgtgagcgaatgggccttgatgtatccaaagtgctccggatggaggaccttgtgagaggggatgacgccatttttgccgcaacgggtgtcacggacggagagctgctgaaaggcgttcagttcaaaggctccgtcggcacgactgaaagcctggtcatccgggcgaaatcaggaacggtccgattcgttgacggaagacacagcctgaagaaaaaaccaaatcttgtgatccggccataaatagagaaaagcgggacggaaagtcccgcttttcttttgcaaaaaagagtcaaccctatcatttatatgtcaaagcattatttaagttgaataattttttgaaatgaggtaaaaataaagagtgctgcgatttttctgtgtcattccttcttttgagtactgggaaattttcaaattctaccgcatacagacgatataaatattgatcttctcaagtttttgtcctcgcttccttcaaaactcattaagacattccttttttaaaaaagcgccgatcatgggtggaagtgttaccgatagaagttcctgaacgttttataaaagaatgtgctttggcggaatcatgcgaagcagccgatttgaatgaaaacagcaatacattgactatgaaaagcgtggtgtttttatgaaagacgtatctatttcctctttggaaaatatgaaattaaaagaactatatgaactggccagacattataaaatctcctactacagcaaactgactaaaaaagaattaatctttgccatcctgaaagccaacgccgagcaggaggatcttctgtttatggaaggcgtgctcgaaatcatccaatcggaaggattcggcttcctcagaccgattaattactcgccaagctcagaagacatctacatttctgcttcccagatccgccgctttgatttaagaaacggtgacaaagtatccggcaaggtgcgtccgccgaaagaaaacgaacgctattacggacttttgcacgttgaagcggtaaatggagacgatccggaatctgcgaaagagcgcgttcattttcctgcgctgactccgctttatccggaccgccaaatggtgcttgagacgaaaccgaactatctctcaacaagaattctcgatatgatggctcccgtcggtttcggccagcgcggtctgatcgtggcgccgccgaaagccggtaaaaccatgctgttaaaagaaatcgctaacagcattacgacaaatcagcctgacgctgaattgatcgtgctcttaattgatgaaagaccggaagaagtaacggatattgaacgttccgtagcgggcgatgtcgtcagctcgacgttcgatgaagtgccggaaaatcacattaaggtagcggagcttgtgcttgaacgggcgatgcgtctcgttgaacacaaaaaagacgttatcattctgatggacagcattacccgcctggcacgggcctacaacctcgttatcccgccaagcggacgtacgctttccggcgggattgacccggctgcgttccatcgtccgaagcgctttttcggtgccgcgagaaacattgaagagggcggcagcctgaccattttggcgacggcgctcgtagacacgggctcccggatggatgacgtcatctatgaagagtttaaaggaacgggcaacatggagcttcaccttgaccgttctcttgcggaaagacggattttcccggcgatcgatatccgccgctccggcacgcggaaggaagagctgctcgtgccgaaagagcatcttgaccgtctatgggcgatccgcaaatcgatgtctgattctccggacttcgcagagaagtttatgagaaaaatgaaaaaaacaaaaacgaatcaggaattcttcgatctgatcaaccaagaatggaagcaggcaaacctttcatcatcagcccgccgctgataaaaaatgtatttgcaaatgcagtaaatgactgatataattctctcatatgcgttccggattcgctccggaataataactctgtttccacacgggattcagggcggaaggagatggatacaatgaaagcaggaattcatcctaatttcaaaaaagcaacagttaaatgcgcttgcggaaatgaatttgaaacaggctcagtaaaagaagaggtacgcgttgagatttgctctgaatgccacccattctacactggacgtcaaaaattcgcttctgctgatggtcgtgttgatcgctttaacaaaaaatacggtcttaagtaataatagattttacaggcaggcaagaattgcttcttgcctgttttttatgtccataaacaggaaaaaaaggggagcggatagcctatgtacataatgaagcaaagcggatggcttgagctgatatgcggcagcatgttctctgggaaatcagaagagctgatccgcagagtgaaaagagcgacatatgcgaagcaggaggtcaaggtgttcaaacctgccattgataatcgctacagtgaggaggctgtcgtttctcacaacggcacatccatgacaagccacgtcatctcgtcttcggctgaaatatgggatcatatcagtgaaagcacggacgtcatcgcggtagatgaagtgcagtttttcggcgaatcaatcatcggcgatttatccttgcttgcggataaaggctatcgtgtcatcgcggccggacttgatatggatttccggggagagccgttcggtgtggtgccgaatctgatggcggttgccgaatcagtgacgaagctgcaggcggtctgctccgtttgcgggtcgccggcaagccgtacgcagcgtttgattgacgggaagcccgcttcctatgatgatccggtcattttagtcggcgcgtcggagtcatacgaagcgagatgcagacatcaccacgaagtgctgaaaaaacagactgataaataacccttttcatgaaaacatcggtaaaaaatccggtgtttttttgacggtttttcaaaaattgtagttaattaacttaaaaaagagtatgaaaaaattaagtaattttcatctcttgaattttcatttttacaggcataaaatgactaagtaatgtaaatagttatgagacattgttcgaataattgtcaaaaaaagatatagcagatcgcgatcacactagccaaaatgggtaattacttaactttgttaactatttgaagaaagaaggagattttcttgaataatattaaagtaacgaaggaaggcaacttagaaactactttaagaggaaaagaagttctatctatccctactttaaataaaggtgttgcgttttcagcagaagaaagaaaaagccttggattagacgggctgcttcctccgaccattctgtctcttgatgagcaggcaaaacgcgcatacgagcagtttcaagctcagccggaccgccttcgccaaaacgtgtatttgaatgatttgcaaaaccgtaacgaagttcttttctttaaattgcttcaaaaccatcttcgtgaaatgctgccggttgtttacacaccgactgtcggtgaagcgattcaagaatacagccatgagtacagaagacctcaagggatttacctttctatcgacaatgtagaaggaatcgaagaggcatttgaaaaccttcatgccactgccggagatattgatctgatcgttgcgacagactcagaaagcatcctcggaatcggtgactggggtgtaggcggtatcaacatcgccatcggtaaattagccgtatacacagctgctgccggtattgacccaagccgtgttattcctgtcgttcttgacgtcggtacgaacaacgaaaaacttctgaacgatcctttatacatcggtaaccgccatgaacgtatccaaggcgaacgttatgaagctttcattgacgcttatgtaaaagctgcgcttaaatatttccctaaagctcttcttcactgggaagaccttggaaacaaaaacgcgcgcaatatcatgaagaaatacaatcatgaaattcttacattcaacgatgacattcaaggaacaggcgcgattacgcttgcaggtgtgcttgcggctatgaagaaaacaggcgcgtctattaaagaccagcgtgtggttgtcttcggtgcgggatctgccggaatcggaatcgctgaccaaatccgcgacactatggtgcttgccggtctttctgaagaagaagccaacaaagcgttctacacaatggactacagaggcttgttaattgaaggtatggaaaacattcttgatttccaagagccgtacctgcgcacagctgaagaaattaaagattggaaacgcgatgaaaacggacaaattcctttcattgaagtgatccgtcaagcgaaaccgacaatcttaatcggtacatcaggccaaagcggcgcgttcagtgaagaaatcgtcaaagaaatggcaaaacacgttgagcgtccggtcatcatgccgatgtctaacccgacaccgcttgctgaagccgttcctagcgatctattcaaatggactgacggcaaagtgcttgtggcgacaggaagcccgtttgacaatgtagagtacaatggcgtttctcatgaaatcggacaatctaacaacgcattcgcgttccctggacttggtctcggttcaatcgttgtagaagcgaaagtgattactcctgcaatgtttgcggcaactgctgacgcaatcgcagaaagcgttgattttgaaacaccgggtgcaggccttctgccgagcatgagcgacttacaagaagtttcaattaaagttgcgatcgccgtagcggaaactgccattaaagaaggcgtggcaaaccgcattcctgagaatgtagaacaagccgttcttgatgcaatgtggaaaccgcaatataaacaagttatcgctaaataatttttacgattaattttacagtccgagggaaagcttttatgtaaaggctaaagtatacggacattaaggatttggaggagaatattttgagcttcttagatattttaatcctcctggcgccgatctttttcgtgatcgtgctgggatggttcgcaggtcgcttcggaagttatgacgcgaagtcagcaaaaggggtaagcaccttagttacgaagtacgcgcttccggcgcattttatcgcaagtattttaaccacttcaagaagtgcgtttttatcacaggttcctttaatgatcgctttgatcattgggattgtcggattctttatcgtcattttgttggtttgcaaatttatcttcaagtatgatttaacgaattcatctgtattttctttaaactctgcacagccgacatttgcatttatgggtattccggtactcggaagcttattcggagcaaacgaagtagcgattcctatcgccgttacgggtatcgtggttaacgccatccttgacccgcttgcgatcattatcgctacagtcggtgagtcatctaagaaacaagacagcgaaaacgagaacttctggaaaatgactggtaagtctattcttcacggtctttccgaaccgcttgcggctgcaccgcttatcagtatcatcctggtactctgcggtgtaacactccctggcttgggtgaaaaaatgcttgatcagctcggaagcacaacatcaggtgttgcactctttgccgtcggtgtaactgtcggtatccgcaacatcaagctcagtctgccggctttcggtatcgctttgttaaaagttgccgttcagcctgcgctgatgtacttgatcgctcttgcagtcggacttccggctgaccagatcactaaagcggtattgctcgtcgcattccctggatctgcggtagcggcgatgattgccacacgtttcgaaaaacaagaggaagaaactgcgtccgcgttcgtgatcagtgcgattttatctcttatctcactgccgatcatcattgcgctgactgcataatgaaaagctccctgtttcagggagcttttttgattagaattgaaatttaaaaggcgaaaatctcgttttttttctgggtttcttatgttctgaagaagcggctgtttctgagaggggagctgtctgggcaagttcctggatgcgggaggccaatgtctgcaattcggtattgaggtcgtcaatttcccgtctgtgctgaagaagctgataagacaccccttcatccgccttttgtttcagctggcgttcaagctcctctatccttgaaagcagatggttctcatcctgtttctctttcgtgagaatgtccagtttgcgctccagctctgccaacctttgttcagcgccgccattgattttcggacgctgcaaaatgaagcccgtccgttttttcggctgccggggcacttgaacgtccagaagggcagtgccttcagaaatttgccgtttgaccgatttcagcacatcaagatcctcaggtgtaaaggaataatgtccgagctcattccgttcagccggaagattcagctgcttgacccacctttgcaccgtttttgcggagacgccgagctctttcgcggccatgtttgtattcatgatcacatacctcctttttgctaggtattcgaccatgaggcggcgttcccttcatgttagacaaaacaagaaggaattcgccaaagaaagcggcatttcttcaaaaaacgttacgcttcatacaattcaagcggaagcttgtcgggatcgaagaaaaaggtaaaccgtttccccgtcagcggatcggttctgatcggttctgtgccgacgccctttttctttaactccctgacggctgcttcaagatcgtttacggtgaaggcgagatgccggagacccgcggcttccggtctggtcggccgttcgggcggatcgggaaaggaaaacaattcaatcgcatacgcgccgtccagcgccagatcgagtttataagattcccgttcctttcggtatgtttcttttataatgccgaaaccgagtatctcggtgtaaaaagctttcgacttttcataatcagagcatatgattgctatatggtggatggatttcagcatatccgcccctccttttttgcttcagtataacagaggcgaattgcttttgactggtgataagccctatactataatgagaatgttacgcacaggaaaacagaggtgaagaccgtgttagaccgtttacagtcaattgaacaacgatacgaaaaattaaatgagcttttaagtgatccggaagtggtcaacgatccgaaaaagcttagagaatattcgaaagagcaatctgatatacaagaaaccgttgaagtctatagacaatacagagacgcatcagaacagcttgccgatgcgaaagcgatgcttgaggaaaagcttgatgccgatatgagagaaatggtgaaggaagaaatctccgaactgcagggagagacggaaaccttatcagagcgtttgaaagtgctcctcatcccgaaagacccgaacgatgacaaaaacgtaatcatggagatccgcggagcagcgggaggagaagaagccgcgctgtttgcgggaaatctctacagaatgtactcccgttacgctgaaatccaaggctggaagactgaagtcatggaagcaaacgtgaccggaacgggcggttacaaagaaatcatctttatgattacgggaaaaggcgcatactccaagctgaagtatgaaaatggcgcgcaccgcgtacagcgtgtgccggaaacggaatcaggcggccgtattcatacatccacggcgacggtggcgtgtcttcctgaagcggaagaagtagaagtggacatccacgaaaaagacatccgcgtcgatacattcgcatcaagcggaccgggcggacaaagcgtaaatacgacgatgtcggccgtacgcctgacgcatttaccgaccggtgtcgtcgtatcctgtcaggatgaaaaatctcagattaaaaataaagaaaaagcgatgaaggtgctccgcgccagaatctatgacaaattccagcaggaagctcaggctgaatatgatcagacccgtaaatcagccgtcggatcaggcgaccgttccgagcgtatccgcacatacaatttcccgcaaaaccgtgtgacggatcaccgtatcggcctgacgattcaaaagctggatcaaatcctggaaggcaagcttgatgaagtggttgaagcgttaatcgtagaagaccagtcaagcaagctccagcaggcggaaaattaagatgaagaccgtttttgaagccctaagctgggcttcttcttatttaaccgaagcgggaagagaaaaaaacgcggccgagctgctgctgttaaatgataccggaatggatcggagcaagcttctcgcaagtctgcaggagcccgtcggcgaggacgagctttaccgattcagacggcatgtggaaatgcataaagaaggcgttccgattcaatatattatcgggaaagaacagttttacggcagagaattctttgtgaatgacgatgttctcattccgcgtccggaaacggaagaagtcgtctttcatctgctggacagacagaagcgggtgttttctgagggagaacgcctgaacgtcattgatatcggtacggggagcggagccattgcggtgacgctcgcgcttgaatgcggacatttttcagtatcggcttcggacatttcaaaagaagcgcttcaggtggcggaaagaaatgcgcaaaacctcggagcggacgtccgctttttgcagggagatctgttaactccttttatttcatcaggaataaaagcggatattattgtttccaatccgccgtatatttctgaagaagaaatggcggatttgtcggatatcgtccgtttccatgagccgcttcatgcacttacggacggcggtgacggtttgaaattctacaagcggtttatggaggagctgcctcttgtcatgaaagataaagcgcttgtcgtctttgaaatcggatataatcagggaaaagccgtgaaagacctgttccgtcattcctttccgaatgcggaagtggaagtcgtacaggacatcaacggaaaagacagaaccgtatccgcggtcatcacatcatgaaaaaagcccgccggtgacgcacacggcgggcttttgttacaatggaaagaaaatgaaaggggcatccgccttgaaaaaagcgttcgccttcggatgtatactcgccgccgcagcttatgcggctggatttgtcctgccgtttggctttgacatcattctcggcgccgttacggctgttcttatcgtcgcagcggtcatcgtttccgggctggccgtaagcggagcggagcagcgggccaattatcattctgaaacagaagaaggacggcgcgcccgtttaaagatggccgccgttttcttttgcgccgctctcccttcagccggctgtctgctgattacgcttctgtagccggattttgtctttgcagcaatacggaatcccatacccaatagacgacggctgttaaaaccgcaaagatataaaaggctgaattagaaaacagagattggcctgacggctgcaaaagaccgaagatgatcccgtttgcaatgaacgacacccccaaataataaagaaaatacagcggatgaaatctcttcggctttttattcagaaagtattgaagcggcagcgcaaaaatcaaataaggaaacaaaaaataaaacgccatcgaaatgaaagccgcgataatgaattgatgaacatacaaaatagaataaatgacagacatacatgccgccgacagcagcacggtgtaattatatttcatctgaaaacctcctatcaaaataatatcgtaccatattttgaatctgtcaatgcagattatcagcttgctagatttttttcttcccgccggtttaaaccttttccgtcatgtccataatgggactagataaaaaaagcacggagaggaacggtggggaccgatgaaacagacaatgatgatctgcatatatatttttcttttattatcaggagcgcttgcgggtttgacaaaagaagaaacggcgcgggcatcagccgatgagcccgtcgtcataccggatgaagcgatccggctcaggattttggccaacagtgataacgatgaggatcaaaagctcaagcgccagatcagagatgctgtaaacaagcaaatcacggactgggtgaaagatatcacttccattgaagaagcgcggcggctcattcgttcgaagcttcctgaaattaaagaaatcgccaaacaaacgatgaaagaaaagggtgcgcatcaatccgtttcagttcaattcaataaaatctcgtttccgacaaagctgtacggcaatatggtctatccggccggaaaatatgaagccattttaattacactcggcaatggcgagggcgccaactggtggtgcgtcttgtttccgccgctgtgcttccttgatttctcaaacggcgaagcggtgaaagatcaggaagacggcggacagaagcaggaagaaacgcagaaacagacagaaaaagtgctggatgacgtaaaagcaaaggccgataaagcgaagaaagaaaataaagatgacgatgataccgaagtgaagtttttcctcgtcgattggatttcagatctattttcctgaagcaaaaggcataaatccggattcgattcatagattggaagaaagagttgatcgaaacggagggaaatatatgttttatcagctgagagtggcaagagatcaagatacggaggcgctggaggcctttttgaaaaagtctgatacggcacatgcggaaatcgatcagcagatcagccggtttatcgtgctggaagacagcgaaaaaaagattgccgcctgtctcgggatcgaaaaattcagcggcggaaaagggcttctccgttcactcgtcatgtcggacaggctgaatcaaagccatatcgttacactgtttcaaagtatggatgtgctgtgcaaaaaacatgaaattcaagatgtctacttagtcgccaatcagccctcatctgctgagtttctgaatgtgatgggatttgaagcgtgcgccgatgcgcctgaggaactgtatacgtccgaacatttccgcaactcgttatgcacagaaggttcgtttttaatggtgaaaacctctgcctgatctaacttatacacaaggttatccacttattaaaaagtgttgtccacagtttgtggataacgcttgttttattaaaggacatcttttatactttcaaaaggaatacacgagagaaaataaagttttaccgctttaaaataaggagtttggttatacatgaaaacaagaagatggtttgtggattgttccgcagaattatccacaaccgatccccaaattacacaagccgcggaattgctccggcagaatgaggttgtggcttttccgacagaaaccgtttacggactgggcgctaacgctgaaaatacggaagccgtaacgaaaatatatgaggcgaaaggaaggccgagcgataacccgctgattgtgcatatatcccatatcagccagcttgatcgttttatcagccatattcctgagacggcgaaaaagcttatggagctattctggccggggcgctgacccttgtcctgccgtgtaagcccggtgtgctgtcaccccgtgtcaccgcgggactggagacggtagcggtcagaatgcctgatcatccggcagcattagccctcatcagctcggccggactgccgatcgccgcgccgagcgccaatttatcaggaaaaccgagcccgacgaaggccgagcatgtagctcatgatttaaacggccgtattgccggtattgtggacggcggcgcgacgggaatcggagtggaatcaaccgttctgtcctgtacggggaaacagcccgtgctgcttcgtccgggcggcgtgacaaaagagcagattgaatccgccgccggtccggttcttgtggataaaggactgaccgaagaagatgaggttcctatttctcccggtatgaaatatacacattacgcgccttctgcgccgatggctattgccgacggcggcgcccggagaattcaagaactggcagacgcatataaaagccggggaaaacgaatcggcattttgacaacagaagagaacgccgatagttaccaggctgattatatcaaggtctgcggcagacgcgccgaccttgaaacagtggcgtccgccttatacgatgcgctccgcagctttgatgaagcggaagtggatatgattatttctgagtcctttccggataccggagtggggctcgccgttatgaacaggctgatgaaagccgcaggcggcaccgttatccattaacttgttctaccccttatcggacatgcataagctaaacaagcgggcacgtccaaggggtttttattcatgtcgaatctattcatcggggaacttgtctccttaagcatcatggcatttgctttggggacggatgccttttccgtcgggctcggaatgggaatgattcagctgaagaaaaaacagatttttcatataggggttgtcatcgggctgtttcatgtcatgatgccgcttgtaggaatggcggccgggcatctgctgtccggttttctggggatgctcgccgtttacatcggcggatctcttcttttcattttaggggtgcagatgatgatcgccgcgtttaaacaatcggacgggccgctcatatctccggcaggctcgggactgttgctgtttgcggtcggtgtcagtctggacagcttttctgtcgggctcagtctcgggatgaacggctccaatccgtttctggccgttacgctgttcggggtcttcagcaccgttttaacatgggcgggccttttggcgggaagaaaggtgcagtcatggctcggctcctacagcgaagcgcttggcggagccattttgatcggattcgggctgaaactgcttttaccgatataagatacgtaaaaaaagaaacgaagatgccgtttcttttttcttcatttataataggtagtaagaggtgacggacatgaaaataatctttgtttgtacaggcaatacgtgccgcagtcccatggctgaggctctttttaaatccatagcagaaacgaaagggctggatgtcagcgtaagctcggccggcgtattcgcgtctccgcacggaaaagcgtcggctcatgccgtagaagcgctgtttgaaaaacggatcgccctcaatcacagttcatctcccttatcggaagaacatatcgagacggccgatctggtgctggcgatgaccgaacagcataaacagctgattgaaggccgatatcaaaacagtcagggcaaagtttttaccattaaagaatacgtgacgggggaaagcggcgatatctctgacccgttcggcggtccgcttgatgtttataaacagacgcgggacgaactggaggagctgctgacccttttggctgatcaattgcttgacgggaaaagcaagtaatctgtcagaaaatctgcaaacaggtcatttgcaaaacgaatgtgaaagagtagaatgaaatcaacggatttcgtaataaaaaggacaagcacactgggctgtcttcgcccagccacacctaggaggtaaatgaatgaaagtagctattgcgtcagatcacggcggcgtccatatccgcgaagaaataaaaagtcttttggatgaattgcagattgaatacattgatatgggctgtgaatgcggcgccggctctgtcgattattcagactacgcttttccggtagcggaaaaagtggtgaacggcgaagctgacaggggaattttaatttgcggcacaggcatcggcatgagcatctccgcaaataaggtaaagggcatacgctgtgcgcttgcccatgacaccttcagcgcaaaagcgacgcgtgaacacaatgacacgaatgttcttgcgatgggcgaacgcgtcatcggcccggggctggcgcgcgaaatcgcaaaagtctggctgacgactgaatttacgggcggccgccacgaacggcggatcggcaaaatcgcagattacgaagaaaaaaatctgtaagaggtgctggacaatggaagagatgaagcaaaaatggacggacatgctgactgagtttcaagagcaggcaggactgacggacggcagtctgctggtggtcgggtgcagtacaagtgaagccgccggaagccggatcggcaccgccggaagcggggattgggctgaattgatatacggcggacttaaccggtttaaggaaaaaacgggtgtgcatcttgcttttcaatgctgcgagcatttaaacagggcgcttgtcattgaagcggaaacggccgagcggttcaggctccccattgtttcagccgtccccgtcccgaaagcgggcggagcgatggcctcttatgcataccggcagatgcgttctccagtgctcgctgaatcgattcaggctgacgccgggattgacatcggtgatacgttcatcggcatgcatctgaaacccgttgccgtccctgtccggatatcgagccgtgagcttggagaagcacatgtgacgatggcccggacaagaccgaagctgataggcggaattcgcgccgtatatgaatgcgaatgatgaaaatacttttcctctataatgttcgtgttttctaattaaattttgtgatttttttaaataagctgttacattcacctgaaaaaccatgtacaataaggtggtaaaaataaagaacaggaaacggataggagaggatctcgctgatgaaacatttacctgtacaagataaacaagtgtttaacgccatcaaagatgagcgtaagcgtcaacagactaagatcgaattaattgcttctgaaaacttcgtgacggaagcggtaatggaagcacaaggctctgttttaacaaacaaatatgctgaaggctaccccggcaaacgctactacggcggctgtgagcatgttgatgtcgttgaggacatcgcccgcgaccgcgcgaaagagattttcggagctgagcatgtaaacgttcagccgcactcaggcgctcaggcgaacatggctgtttacttcacgattttagagcacggcgacacggtgctcgggatgaacctctcccacggcggccacttaacacacggaagcccggttaatttcagcggcgttcaatacaactttgtagaatacggtgtcgataaagacacgcaatatatagattatgaagatgtgcgtgaaaaagcgctggcgcataagccgaaactcatcgttgccggagcgagcgcatacccccgcacgatcgactttaaaaaattccgtgaaatcgctgatgaagtcggcgcttacttcatggtagacatggcgcatatcgcgggtcttgtcgcagccggccttcatccgaatccggttccttacgctgactttgtaacgacaacgactcacaaaacacttcgcggaccccgcggaggaatgatcctttgccgtgaagagttcggcaagaagattgataaatccattttcccgggaatccaaggcggaccgcttatgcatgtcatcgcggcaaaagccgtttctttcggagaagtgcttgaagatgatttcaaaacatatgcgcaaaacgtcatctcgaacgcgaagcgcctggctgagtctctgaacaaagagggtattcagctcgtatcaggcggaacggataaccaccttgtgcttgtcgacctccgttctctcggactgaccggaaaagtcgctgaacacgttcttgatgaaatcggcattacatctaataaaaacgcgatcccttacgatccggaaaaaccgttcgtcacaagcggaatccgtctcggtacggcggctgtgacaagccgcggctttgacggtgacgcgcttgaagaagtcggcgccatcatcggcctcgcgctgaaaaatcatgaagacgaagcaaaacttgaagaagcgaaacagcgcgtatctgccttgactgaaaagtttcctttatataaagaactggactattaataaggaagaaacccgccggaaccttaatccggcgggtttttttatgattttcttgaaactgtttgtctttttctgtagaatcaatagaagtgtgaaaaagtcactcggacaacaaaaaaggagctgaacacagtatgggaaaggtttacgtatttgatcatcctttaatccagcataagctgacatatattcggaatgaaaatacaggcacaaaggatttcagagaccttgtggatgaagtcgcatcactgatggcgtttgaaattacacgtgatcttcctcttaaagaagtggaagtgaaaacacctgttcaaacagcgacatccaaagtgatttcagggaagaaactcggtatcgtgccgatcctgagagcgggtctcggaatggttgacggcatgctgaaattaatcccggccgctaaagtgggacatgtcggattataccgtgatccggaaaccttaaaaccggtggaatactatgtcaagcttccttctgatgtagaagaacgcgaatttattgtcgtggatccgatgcttgctacgggaggctctgcggtggaagcgatcaacagcctgaaaaagcgcggcgcgagaaacattcgttttatgtgtcttgtagcggctccggaaggcgtggaagagctgcagaaacatcattctgacgttgatatttatatcgccgcccttgatgaaaaactgaatgaaaaaggctatatcgttccgggcctcggtgacgcgggtgacagactgtacggaaccaaataaatcggaaaacctcattcaggggttttcttttttttatccagattttagctgaatgggcagaggtcatacatttataggtgaatttgtgaacattctgtgtatgcttccggtataaaaagttttttaactttaaacagattgacacatgttaggggctattgtatgctaaacgagggtattatgagaaggttttcattcctttcatttctagtatccatcctcattttaaatcctccaaaaaaacccgttatatgaggatttatctaagcgaatgaaacagcatcccgtagcatcaggaggatgagtggttttttcgaacaggccgttttgcggacaaaaaaggccttctgcaagggttaaccgcatgttttgccgtatccaggaattatattacattttcatcaggagacagatagttgatggacgatcccaatcttacattcagcagacaacggagatatgtatttgtaatcttagcaatctatttgctgggatatggtcttacggcgtataaaactgtttttttaggcctctttttgggaactgttttcagtttgtttaatttgtggctcttgaccagaagaatgaatgcttttgacaaggccgtggcgaaaggaaagtccatacgatcactcgggagcgcagcgcgttggtgcaatgcgatacttgcgatggctgtcgcctttaaatatcccgataaagtcagtgtggcaagtgtgattattggattaatgacaatttatcccgtcattatgatagattccattattcagctcaaacgttcatcaatggaagagaggtgaaaacccattgaatcacgattacagaactattgatttgtttggtcttacttttaatctgacaaacattctgatgattactgtggcaagtgtgattgtgctgctgattgcgattcttactacaagaacgctgtccatccgtccgggaaaagcccagaacttcatggaatggattgttgattttgtccgcaatattataggcagtacaatggatttaaaaacaggggctaacttcttggcgcttggtgtaaccttgctgatgtacatatttgtatcaaatatgctagggctgccgttttctgtaacggtcggacacgagctttggtggaaatcaccgacggctgatccggctattactctgactctagccgttatggttgtgtcgttaacgcactattacggcgtgaagatgaaaggtttgaaggaatactctaaggattacctcagaccggttccgcttatgttcccgatgaagatcattgaggagtttgcgaatacgctgacactcggacttcgtctttacggtaacattttcgccggggaaattcttcttggcctgcttgcgaatctggcgacgaatttctactcaaacagtttctttctcggtttggtcggcacagtcggagccattattccgatgcttgcatggcaggcattcagcttgttcatcggtaccatccaggcatttatctttacgatgctgacgatggtgtacatgtcacacaaaatcagtcatgatcattaaaatcatatatccattcggataacattttaaaggaggaactttttcatgaatttaatagcagctgcaattgcaatcggtttaggtgcacttggtgcaggtattggtaacggtctgatcgtttcacgtacggtagagggaatcgcccgtcagccggaagcaggaaaagaacttagaactcttatgttcatgggtatcgcattggttgaggcccttccgattatcgctgtcgttatcgcgttcttagcgttctttggctaagcaaaaaagccttatatgaactaaaaatggcgaagatcactctaagagaaccttcgccattgctttatgtctgataagcaggccgtcccgaaacggctttttatcagcagagaaaacctgcagaagggagttgccgtagtagatgtctcaattacctcttgaattaggactgtcgtttaacggcggagatatcctattccaattgttagctatgttagttttattagcgcttctcaagaaattcgctctgggaccgctattaaatataatgaaacagcgtgaagatcatatcgccggcgaaattacgtccgctgaagaaagaaataaagaagcgcagaagctgattgaagagcagcgcgttcttttaaaagaagcgaaacaggaatcacaatcactcattgaaaatgcgaaaaaactgggtgaaaagcagaaggaagacattatccaggctgcacgcgccgagtctgaaagattgaaagaagcggcgagaaccgaaattgtcaaagaaaaagaacaagcggtttccgcacttcgcgagcaagtcgcatcactttctgtcttaatcgcatcgaaagtgattgaaaaagagcttgatgaacaagcccaggaacaactgattcaggactatcttaaagaggtaggagaaagccgatgagtggatctgctgtctctaaacgatacgcgtcagcgcttttcgacattgccgttgagacttctcaaatcaatgaaatcgaagaagagcttaccgtactaaaagaagtgttccgaaacgaagccggattacaggaagtgctaagccatccgaaggtatcggccgctaagaaaaaagagctgattcagcaatcgttcggcgcactgtctgagtctgtgctgcatacgatttttcttctgattgaccgccgccggtcttcgattgtgcctgatctcacagacgagtttatcaaacttgccaatcaggcccgtcagacagaggacgcggttgtttattcagtaaagccgctttcagaagcggaaatgttatcattgtctcaagtgtttgcaaaaaaagccggaatcgcttcgctcagaatcagaaatgaagtgcagacggatttaataggcggcattaaagtccgcattggaaaccggatttatgacggaagcgtaagcggaaagcttgagcgcatggaacgtcaacttgccggaggaaatcgatagaaggggtgaaacctaagtgagcatcaaagctgaagagattagcacgctgataaagcagcaaattcaaaattaccaatctgaaattgaagttcatgacgtaggtacagtcatccaagtcggagacggtattgcgcgtgtacacggccttgacaattgtatggccggtgaacttgttgagttttcaaacggcgttttgggtatggctcaaaaccttgaagaatccaacgtaggtatcgttatcttaggaccttacagagatatccgcgaaggtgatgaggtcaaaagaacgggccgcatcatggaagttcctgtaggtgaagaattaatcggacgtatcgtcaacccgctcggacagccggtagacggactgggtccgattctgacaagcaaaacacgtccgatcgaaagccaggctccaggcgtaatggaccgtaaatcggtacatgagccgctgcaaacgggtatcaaagcgatcgacgcgttaattccgatcggccgcggacagcgtgaactgattatcggggatcgtcagacaggtaaaacatctgttgcgattgatacaatcttaaaccaaaaagatcaagacatgatctgtgtgtacgtagcgatcggccaaaaagaatctacagtacgcggcgtggtggaaacacttcgtaagcacggcgcgcttgattacacgattgtcgtgacggcatccgcttcacagccggctccgcttctttaccttgcaccgtatgcaggggtgacaatgggtgaagaattcatgtacaacggcaagcacgttctcgtcgtatatgatgatttatccaaacaagcggccgcttaccgtgagctgtcattgcttcttcgccgtccgccgggccgtgaagcattccctggggatgtattctatcttcactcccgtctgcttgagcgcgcagccaagctgagtgacgctaaaggcgcaggatcaattacggcgctgccgttcgtcgaaacacaagcaggagatatctccgcttatatcccgacaaacgtcatttccattactgacggacagattttccttcaatccgatctattcttctcaggcgtgcgtcctgcgatcaatgccggattatccgtatcccgtgtcggcgggtcagcccaaatcaaagcgatgaaaaaggtagctggaacattgcgtcttgaccttgcttcataccgtgaacttgaagcattcgcccaattcggatctgatcttgaccaggcgactcaggcgaaattgaaccgcggtgcgcgtacagttgaagtgctgaagcaagacttgaataagccgcttccggttgaaaaacaggtagccattctttatgcgctgacaaaaggatatcttgatgatattccggttgcggatatcagacgttttgaagaagagtactacatgtaccttgatcaaaaccataaagatctgcttgacggcattgcgaaaacaggaaaccttcctgctgatgaagacttcaaagctgcaatcgaaggcttcaaacgcacatttgcaccaagcaactaacccttagaagatgagagaaaaaggttctctttttctctctttttacgcaaatgaagaataaaggtggtgaaatctttggcctcattacgcgatattaagtcaaggatcacgtcaacgaaaaaaacaagccagattacaaaagccatgcagatggtatccgctgcgaagctgaaccgtgcggaaaccaacgcgaagtcatttgctccgtatatggataagatccaggaggttgtgtttaacgtcggaaaaggcgcgaaaaacgcgaaacacccgatgcttgtctcaagagaagtgaaaaagacggcgtatctcgtcattacgtctgaccgcgggcttgcgggtgcgtttaacagttcggttttgcgaaacgcttaccgcaccattcaagaacgccatcagtctaaagatgaatacacggtgattgcaatcggcagagtcggccgcgatttcttcaaaaaacgggagatgccgattttgtctgagttagtggggcttggcgacgaggtcacttttgctcagattaaagatttgacccgtcagacggttcaaatgtttatcgacggcgcttttgatgaactgcatttggtgtataaccatttcgtcagtgcgatttcacaggaagtgacggagaaaaaagtgctgcctttaacggatttcggaacgagcggcgggaagcgcacggcttcttacgagttcgaaccggatgaagaagaggtgctcgaagtgctgcttcctcaatatgcggaaagcttaatttacggcgcgcttcttgacagtaaagcaagtgaacacgctgcgagaatgacagcaatgaaaaatgcgactgataatgcgaaagaactcattgattcactttcgctttcatataaccgcgcgcgtcaagcggcgattacacaagaaattaccgaaattgtcggcggtgcagccgctttagaatagaaagattttgtcaggagggatagcgatgaagaaaggacgcgtaagtcaggtgcttggaccggttgtcgacgtacgtttcgaggacggccacttgcctgcgatttataatgcgattaaagtttcacagccagctacaggcgaaaatgaagtaggcatcgacctaacgctagaggttgctcttcatttaggcgatgatacagtccgtacaattgccatggcatctacggacggaattcagcgcggaatggaagccgttgatacaggtgcgccgatttccgttccagtcggtgatgtgactctcggacgcgtatttaacgtactgggagataaaattgatttaaatgaaccgctgcctgcggatgctcaaaaggacccgatccacagatcagctccttcattcgatgagctttcaactgaggttgaaattcttgaaacggggattaaggttgttgacctgctcgctccttacatcaagggcggtaaaatcggattgttcggcggcgccggcgtaggtaaaaccgtattaatccaggaattaatcaacaacatcgcgcaagagcacggcggtatttccgtattcgccggtgtaggagagcgtactcgtgaagggaacgaccttttctacgaaatgagcgattcaggcgttatcaagaaaacagccatggtcttcggacagatgaacgagccgccgggcgcacgtatgcgtgtagcactgacgggtcttacaatggctgagcatttccgtgataaacaaggacaggacgtactgttctttatcgataacattttccgtttcacacaagcgggttcagaggtttccgcgcttctcggccgtatgccttctgcggttggttatcagccgacgcttgcgacagaaatgggtcagcttcaagagcgtattacgtctacaaacgttggttcagttacatctatccaggcgatctacgtgcctgccgatgactacactgacccggctccggcgacaacgttcgctcacttggatgcaacgactaaccttgagcgtaaattaactgaaatgggtatctaccctgcggttgatccgctggcttccacttcccgcgcgcttgctccggaaattgtcggagaagagcattatgcggtggcgcgtgaagttcagtcaacgcttcagcgttacaaagaacttcaggatattatcgcgattctcggtatggacgaattaggtgaagaagacaagcttgtcgttcaccgcgcacgccgtatccagttcttcctttctcaaaacttccacgtagctgagcagtttacgggacaaaagggttcttacgtgcctgttaaagaaacggtacgaggctttaaagaaatcctttccggtaaatatgaccatcttccggaagatgcattccgtcttgtgggacgcattgaagaagtcattgagaatgcaaaagagatgggtgtagaagtttaatctggtcctaggagggtaaaagcatgaagaccgttaaagtcaatatcgttactcccgacggcccagtatatgatgctgatattgaaatggtgagtgtaagagccgagagcggtgatctcggtatcctgcctggccatattccgaccgtggctccgcttaaaatcggcgctgtccgccttaaaaaagacgggcagaccgaattggcggctgtcagcggcggatttttagaagtccgtcctgatcaggtcactatccttgcacaagccgctgaaacagcggaaagcattgataaagagcgcgcccttgctgcgaaaaagcgggcggaagaccgtttgaacaaacgatcagatgatactgacattcgtcgggctgagcttgcgttacagcgggctgtaaacagattggatgttgcaggaaactaaaaaagaatccttctcggctgtctgagaaggattctttttctatattaacgcataagagattcatagacgccgataagcggatgatcctcttctttttgcagatataaatgttcgcagcagttgtcggtgtgccacgttttgtttcctctccgcacacccgtcgtataagcgccgtccgtatacggataaggtttgacgacccattcggcatcgtcatgatgtctgatggcgcaatcgatgacatacacactgagcattttctcaaattcgtcaatcggcaggttccaatccgccaaaagcagctcttttatgctgcggaagtaaagagcttccactgccagcaggctgccgggtgaataatcaagagaaatgttgaaaaactgacataattctttcagttcctctgtttgagactgtctataatcatagtagaatgctatcgcttcccactcgtggtcaaatacgggaagtgtttctccatactgcttttccggatgaaaaaaggaatgattcatattcccatctcctttccaaaaaagtatatcatgccggagaacggacatttaagcggggattgcccctaattttggataaaaattctgatgtaaaaatgatcatctttctctcttcttcttatataataagagaggatatgaggggcggaaaaaatgaaaggagatggaatttgtgaatgtattggggcagcaggccgcaatcagcatcctggttcacctggtatgcattgcggtgacatggtgggcgcttcaggccgtcaactttgatccgctgatccgaaaaggaaaaatagtgcaggcgaggctgctgatcattcttcttaccattgcgatcggtacggcagtcgccaacttctttttagattatcttacctattcgaaacagcttccatacttattttaagatgtttcgtctgttgaaatgaagggaatcgctgggtgagaaaccaatttttcttcacccgcttggcgagttttgacgaagttttccatgtattgctttccccggctccggcaaaaatgggagtaagggggagagatcgatatgaagaaaaaaagagcaggccgtatcatcttgttttttgtttttttaagcgccttaatagcggtatttcattccattcatgcaagtgagctgtctccgcttgcccagattgccgaaggaatggagcggcagcaggtcactgtggatgaatggacgcttcatgcgaaaaaaaatctgaacctgtcactgagtgaatttgatgacaaggtaaaagaactgaagacgcagtatccgcaatatcattgggaatccgcgcgggaagataaaatcgtaaaggccgtcggcacgtattctgacaaaaaaaatcacacaacttttaaactgcagctcgtcactaccctcaaaaaccagaacccaacttcgtatttattatatgagcaaatgagcccggagcaaccggaaaactggaatgatacatatgaacagtttgaacggcaggcacatgacatatttcaaaataaagtatttatttttacttgtctaaagggtcatttaaatgataatatgagtattgttttgcaaaaaaaagcagaacagctcatgaaagaatttgaagcaagtccagttgaacatgtagttgagcctcatttcgtttctgtttctgcatttacatataagtggacagattacatcatgacatcgaaacataagatgaatgtgcaagttgcgcttagaagtgcgggaatgggcggaaaacataccgttacggttggcacaccaatcgtgacaactgaatattaatatagagaatatagggacgcggaggggaataccttggaaaaaatcatcgtccgcggcggtcagaagttaaacggcacagtgaaagttgaaggagcaaaaaatgccgttttaccagttatcgctgcatctttattagcaagtgaagaaaaaagcgtaatatgtgatgtacctacgctctccgatgtatatacaattaatgaagtgttgcgtcatttaggagcagatgtgcattttgagaataatgaagttaccgtaaacgcttcttacgctttagaaacagaagcaccttttgaatatgtgcgcaaaatgcgcgcgtcagtgcttgttatgggccctctgttagctcgtacgggtcattcaagagtagcgcttccgggcggttgcgcaatcggctcaagaccgattgatcagcatttaaaaggctttgaagcaatgggtgcaaaaatcaaagtaggcaacggctttattgaagcagaagtggaaggccgtctgcagggcgcaaaaatctatttagatttcccaagtgtgggtgcgacagaaaacttgattatggcagctgctttagctgaaggaacaacaacgcttgaaaacgtggcaaaagagcctgaaatcgttgacttagcgaactatatcaatgcgatgggcggaaaaatccgcggagccggcacaggcaccattaaaattgaaggtgtcgagaagcttcgcggcgtaagacacaacatcattcctgaccgtattgaagcgggtactttcatggtggctgcggctatcacggaaggaaatgtattagtcaaaggtgcggttcctgagcatcttacgtctttaattgcgaaaatggaagaaatgggagtcaaaattacggatgaaggagaaggccttcgtgtcatcggtcctgcccagctgaagccgatcgacattaaaacgatgcctcacccaggattcccgactgatatgcagtcgcaaatgatggcgctgcttctccgtgcgagcggaacaagcatgattactgaaactgtgtttgaaaaccgttttatgcatgctgaagaattccgccggatgaatggcgacattaaaattgaaggacgttctgtgatcattaacggtcctgtacagctgcaaggcgcagaagttgccgctacggacctgcgtgcgggcgcggcgctgattcttgcgggattagtggctgaaggtcatacacgcgtcacggaactgaagcacttggatcgcggttatgtgaatttccataaaaaacttgcggctctcggcgctgacatcgagcgtgtcgttgatgaaacggccgctgaacaagaaagcaaagaagtcgtaactgacctaaacgcataatggctgtaaaaacagtatgtcaatctggcatactgtttttttatggtttatcatcattattatgctctgattttcaaaaaagaatacgtttttcgcgtgaaaaatggaataagattctgtccaaaaggaagtcatattagcttgtccctgcccataagatgaagtagagtcgaatcccaagcaggaggcagctgatatatgaaaccgattgtatttctactatccgggctgtgtatacttattcttcttgttcccaccattctcgttcttccgtttcaggcggaaaaaggagcagccgtaaacagagagcccggacacaaaacaacacacaccacacgagaaacaaaaggagcagaaacattgaaagaatcacctgtatccattccggtttatcggacatccaatcattctgtagagaacattccgcttgaagagtacgtgatcggtgtcgtggcttccgaaatgcccgcaacctttaaaccggaagccttaaaagcccaggcgctcgccgcccggacattcatcgtcagattgatggttgctgactcagccgttcaggcgccgaaaggatcactggtggacgatacgcaaatgttccaagtctatcaaagcaaaagccagctgaaaaaagaatggggttctaagtacgcacacaacctcaagaaaatcacaaacgcggtcgcaggcacgcaaggaaagattttaacgtacgacaacaagccgattgaggcatctttcttctctacgagcaacgggtatacggaaaatgcggaagcctattggacaagcgccattccttatttaaagagcgtgaaaagtccgtgggataagcaatcgccgaaatatcttgccacccagaccttcagtgtgccggagtttcagcaaaagctcggcgtacagctctcgggacaaaacacggtagggcagattacagccagaacgccgggccatcaagtggcgacggccgtcataaacggcaaaaagctgaagggaagagacatccgggaaaaactcggactccgttctgccgactttgaatggaaacggaacggcggcagcatcaccattacgacaaaaggattcggccacggcgtcggcatgagccagtacggggccaattacatggcggagcaggggaaatccgtggcggacatcgtcaagcattattatcagggagtggacatatccgaagcagattcatttttaaacaaatatatggcgaaaaaataggcgctttcatgagcgtctgttttttttgaaaactattccataaacggtaaagcaaccaacagactcatataacgaaagcctaaaggctgacaaatgccgtctgaaggctgagcgccgggtgaaaatcactgataaaaatgccgtatctatgtgaatatacgcaaaaataatgaggaacgccgtcctatttatttcccttttcatctcatttacgataaatattgttcggcgttgaacgtaaatctattgaaaaggggaagaagcaatgaaaaaaacactttcactcataatcatgctcggattgatgctgactgctgcatctcctgcttttgctgccgagaatgcaaacgagaagacatttttatttaaaaacaatatcgccattctgcttgatgcgagcggcagtatggcgaaacggattgacggcgtttctaaatacaatatggcaaaagatgaaatcgtccgttttgcagatcgaattaagtctacatcacaggtcagaatgacggttttcggttcggaaggcaataataaaaactccggaaaagttcaatcttgtgaatccattcgcggtgtatacggattccaaaagtttgacagacagagcttcctcaactctctgaacggaatcgggcctacgggctggacaccgattgcaaaagcattagaagatgcgaaggcttcttttaacggcgttcataaattcggctttaaatccgtttacctgttgacggacggtgaggagacatgcggcggagatcctattaagacagcgaaagaacttcgcaaacatcatattaaagtcaacgtgatcggctttgactttaaagaaggcttcaacggacagcttcacgcaattgccggtgcgggcggaggaaaatattacgaagctcacagccaaaaggatatgaaccgcatctttacgatggaagcgagttcattagcgaaataagaaaaggtgccgtttagcggcccttttttttatttttatttaacaaaaatttcaagaaaagatgaagagaaaactgtaaaaagaatcagattccggacttatattacaaaaagggcgaaaaaggcattaaatctgtcatcatttatccaatctttttaggatgatgcgcataattctgttcatttttaacggcgtacagccgcttatacaaaaggaatcccgccctatatctttttgcatactcctcatctagcatagagaagagccgggggcccatcggccaaaaacaaacggagaggaatgaaggaaatgaaaaaaatgttcactgcggggattgtcggacttttgacgctttcactcggatcacctgtttttgcagctgagaaaaagcacgaagaaacaaacgtcgccgtgctgtttgacgcaagcgggagcatgatacaaaaaacagggggagagcgtaaaatagatgttgcgaaagagtctgtcacttcttttgcggaagttcttcctgaagacacgaatctgatgcttcgggtattcgggcataagggcaataataaaaactcaggcaaagccgtatcatgtaacgcgacagaaacgttatacggccttcagccgtacgccgtgactccatttgagcaatcactcagcaagattaaaccgaccggctggacaccgatagcgaaagcgctttctgatacacgtgaagaatttgagcgggccggcgctaaagggaaaaacgtcgtatatctgatcacagacggtgaagaaacatgcggcgggaatcctcaagccgaaattcaaaagctccgtaaagcgaatgtcaacacggtcgtcaatatcatcggcttcaacttcggcatgaaaggaagcgaaagccttgaaaaagcggcggaagcgggaggcggcacatacgtctcagctgacagcgcggacgagttcaaacaggcttgggaagacgccgcaaaggatttagcaaaagaataggttaaaaaaggacgcccgtgcggcgtctttttttgtttagaaaacggaaccgcgggaatgatacggataaaaggagatgaacgctgttgttaaaaggagcaggcattatattggtgctggcggcagtcgtttttgttctgatagggatttttctgaagcttgccgccttcatattcgtcagtatattggccattatcgccgcagttattttattcaccattctgagcagacatcatcgcaatgaaacatagagtccgaagagggctctttttttaaaccgcaaattcgacaaaatacagggattgtggaagaataaaagagaaggatactgcggaggggaaaacagtggatgaaaaaacaacagcggtaagagacatataccgctatgaaaaaggggtattaacaaagacggcagatcggatggtttcagagtatccgcttaccgtcatggtgaacgggcaggaatttgttacgctcgtctgcacgcctgaccatttagaggaactcgtcatcggatttctcgcatcagaaggcgtcattcgttttgaaaaagagatcaaaagctttactatagatgaaagtctcgggttcgcatatgttgaactgacgaatcccggagtgcttgagcaaaaagactatacgaagagggtcatcggttcatgctgcgggaaaggccgccatttttactttcagcaggatgtgaaaacggccaaaaccgccgtcagccggattaccataactcctgagacgtgccttcgcctgatgaaggagatgcaaagcggaagcggcaccttccgggaaacgggcggcgtccataatgcagcgctgtgcgatacggaaaagctgctcttgatgaggacggatatcgggcgccacaacgcgctggataagctgtacggctgctgtttgaaaaacggaatgcccgtccgtgacaagctgatcgtcttcagcggccggatttcctcagaggttttattaaaagccgcaaaaatcggcgtgtcgattgtcatttcaaaatcggcgccgacggagctcgcgctgcaaatggcggaagagctgaacatcaccgcgatcggttttgtcagaaacggatcatttaacgtatacacacatcctgaacgggttgaacaatagaaaggggtcttgggcttatgaatacagaaacgcgccgggtgacagacaaaaaggaaaggccgctcagggatcttcgtatctctgtaaccgaccgctgcaacttcagatgcacgtactgtatgccagccgaattattcggaccggattatccatttttacaaaagacggaattgctctccttcgaggagcttgagcggcttgcgaagctgtttgtcggccgcttcggcgttgaaaaaatcaggctgacgggcggagagccgctcatgagaaaagatatgcctgaattgatcaaaaaacttgcgcgcatcccaggacttaaagatatcgcgatgacgacaaacggctctctgcttcccgtgtatgcggaaaaactgaagcaggcggggctgcatcgagtgacagtcagcctcgattctttagaggatgagcggtttaaggccattaacggccgcggcgtttcggtgaacaaggtgcttgagggcattgaggcggcaaaagcggccggactcggtgtgaaaatcaatatggttgttcaaaagggcgtcaatgaaaaagatatcctgccgatggcccgctattttaaagaaaaaggtcatattctccggtttattgaatttatggatgtaggcaatacgaatcaatggaataaaaaagacgtgatcacgaaggccgaaattattgatctgatcaaccagcacatgccgacggagccgatagaagcgaattacaaaggagaggtcgcttccaggttccgctatcttgacggttccggcgaaatcggcgtgatttcctccgtctcggatgcattctgcgcctcctgcaacagagcgcgcctgtcggcgagaggcgagctgtttacgtgcctgtttgcgtcaagcggctatgatgttcggaaactcgtgcgcggcggtctgaccgatgatgaattgacggaatccatcgcttctgtctggagaaatcgcgcggatcagtattcaattgaccgcgcgctttctaaaacggatgggaaaaagaaagtggaaatgtcttatataggcggatgaagaaaagcttgcccggacaagggcaggcttttttattcacaatatgagagcggtctgttcaaaaaataccggtaacagccgaaatatatgataggaattttgatgcaggacaatcaagttatgcaattccaaagccatacaatatgttaaaatataaccaatagaaattagaaaaggttgtgaaaggggcatgaccgcatacgagattccgtcatctcaagttggagtcaagatcaacaaatggtacaagcacattttagcgtttcaagcggctgatgccataaagctgaaagaggaaattgatgaggatatacaacgtatggaggaagaccagctgctgctgttatattatcagctgatcagctaccgccatcatattatgcttgattacgtcaagccggaatgcaccgaacaatcacagattcagtacagcgagctgcaaaagacgatcgaaagcacggacagcatatcgggactgtctgagtattatttccatttgttcagagggatgtatgaattcgatcacaataactatgttgcggctatttctttttaccggaaagcggaaaaactcctttcatttgtcgaggatgatatagagagggcggaattccatttcaagatgtctgaagttttttacgtcatgaagcagactcatttttccatgaatcacgggattcaggcgctggatacgtatatgaaacacgatttttacagagtgcggagaattcaatgccatttcgtcatttcaggaaactacatcgactgcaaaaactacgacaaagcgcttgagcatttagacgaagccctccgcctttctttgcttgaaggacagccccgcctgatcgggtcttcgctttacaatctggggaattgttatgctgaaaagcgggatctggatgaagcggcccggtactttagaaaagcggttcccgtttttgaagagcatcagcttgaacagcttccgaaggcgctgttcagcttaacgcacacccttttcaggctgcatgatgaccaagcggcccttacctattatgaaagagggatcatgatcgcgaaagaacgcggcgaccgattcagtttagagaagtataagtttttacaagcgctttatttggagtcactcaatatggatttaatccatgaagtgtttgactatatgaatgaaaaatcgctgtatgtgtatattgaagatttcgccttggaggccgccgtttacacaagcgcacatgagcaatataaagaagcggcgtatttttatgaaaaagcgattcgcatgagagaaaaaattcaaaaagaacagtgtttatacgatatataatttttgttaaccatctgatcagcagatggttatttttttatgcacatcaggacgtttgatcatagaaaaaatcggaaaaatcgcaaaagagggaaaaaagtacgatgggaaggagggatttgttgttcggatttaatgatatgataaagtttttcgtttcatttctcatcattctcccgatggtgtctgtcatccatgtgtcgggacacagctttatggccatgctgttcggaggcaaggcgtcgttggatatcggaatggggaaacgtcttttaaaagtagggccgattcaggttcggcgtatctacttcatagattctttctgcaagttcggcgaattgcggatagataaccgtctgacgagcgcgctcgtctattccggaggctgtctgtttaatctcgcttctatctttttaataaatctgctgatcataaaagatttcctagagccaaacttatttttttaccaatttgtctatttttcaacttattatgttttctttgctcttctgcccgtgcaatacggggataataagctgtcagacggattggccgtttacaaagtgatccgctacggggaacgctgtgaaatcaataattgagagttgaaatgtttgctatcaggctgaaagggaagaaaacaagtacacaaaaacaaaaggagctgaagagatcatgagtgaagataacggtttaaaagacaaagtaaaaggcggcatgaacaaaataaaaggggaagcaaaggacaaagcaggcgacatggcaaacaagtccgacttaaaagcggaagggaaaaaagacaaagcgaaaggcagcctgcaaaagggtgtcggtaaaacgaaagataaactcagtgatgattaatttgatcgtgaaacacagcaaaagcccaaaatattttgggctttttgttatgagaaatgacaaaaattccagttcgtttggttaatattcactaaatttttaaatattctataaattccccggcgatttctttataatattcacaaagaatgtaacctttcttcacatttaattaaacgtttgttgaagaaaaaaatgagaaatcggtcatttctgcaaaaggaatcgggccgttcactgtcgaataacttttatcacttaacatttcatgaggtgaagggggtgacggccgcctgcatcgtttcggtatgaccatgcggattgtgtttgactatcactaagggggaatacagatgaaactgacaccggttgaacaagaaaaattgcttatttttacggcgggagagctcgctaagcagcggaaggcgcgcggcgttctgctgaattatcccgaagccgccgcatatttgacctgttatctgatggaaggcgcgagagacggaaaaagcgttgctgagctgatggaatccggccgcaatgtattgacggaaaaagacgttatggaaggcgttgcggaaatgctggacagcattcaggtggaagcgacgttcccggacggggttaagcttgtcaccgttcatcagccgatcaaagcggaggtgaagtcatgaagccgggagcgattcaagtcgcaaaggggaccatcaccattaacgaaggccggaagacgctggaggtgtcagtcaccaataacggaacacggtcagtgcaggtcggatcgcattttcattttgccgaagccaacggcgccctttccttcaatcgggacaaagccatcggcatgcgccttgatatcccgtcaggcacatctgtccgttttgaaccgggagaagagaaaaccgtcacgctcgtggaaatcggagggcgaaaaacggtcagaggcctcaacggcatggccgatacgtatatggatgagcggggaaaagagaagacgctgtcaaatcttaaaaaagccggatggatggaggaggcgatccgatgaaaatgtcacgtgagcaatacgcagaactgttcggaccgacaacgggagacaaagtcagactcggagatacggatttatggattgaagtcgaaaaagatttcacgaattacggggaagaaatgattttcggcggagggaaaacaatccgggacggcatggggcagaacgggcgtatcaccgggaaagacggagcgcttgatctggtcattacaaacgccgtcatcctggattataccggaatcgtcaaggcggatatcggggtgaaggacggccggattgtcggcgtcgggaaaagcggcaaccctgatatgatggatggggtggacccgcacatgattatcggtgccggaacagaagtcatttccggcgaagggaaaatcgtaacggccggcggggtggatacgcatatccactttatctgcccgcagcagatggaagtcgcgctttcttcaggcgtgactacgcttctcggcggcggaacaggtcctgcgacgggaagtaaagcgacgacttgtacatccggtgtatggtacatgtcgagaatgctggaagcggccgaggagtttccgatcaatgtcggtttcttaggaaaaggaaatgcatccgataaagcgccgctgatcgagcaggtggaagcaggcgcaatcggcctgaagctgcatgaagattggggatcaacgccaagcgccattaaagcttgcatggaagcagcggatgaggcggacattcaggtggcgatccacacagacacgataaatgaagcgggctttttagaaaatacgcttgatgcgatcggcgaccgggttatccatacatatcacatagagggagccggcggaggccatgcaccggatattatgaaactcgcatcttacgccaatatcctgccgtcctctacgacgccgacgattccatataccgtcaacacgatggacgagcatcttgatatgatgatggtctgccatcatttagattcaaaagtgcctgaagacgtggcgttcagtcattcacgcatcagagcggccaccattgcggcggaggatattctgcacgatatcggcgcgatcagcatgacgtcatctgactcgcaggcgatgggcagggtgggagaagtgattatccggacatggcaggtggccgataaaatgaaaaaacagcgcggcgctctatcgggagaaaacagcaatgacaatgtgcgcgccaaacgctatatcgccaaatacacgatcaacccggctgtcactcacggtctgagccatgaagtcggttccgttgaaaaaggaaagctcgccgacctcgtactatgggacccggttttcttcggcgtcaaacctgaacttgtgctcaaaggcggcatgattgcccgcgcccagatgggagatccgaatgcttccattccgacgcctgagcccgtgtttatgcggcagatgtacgcatcatacggtaaagcaaaccgcaatacctctattacatttatgtcccaggccggtatcgcaaacggtgtgccggaaaagctcggccttgaaaaaatgatttctcccgtacggaatatccgtaagctgagtaagctcgacatgaagctgaatgacgcgatgccgaatatacatgtcgatccgaaaacctatcaggtgttcgccgacggagaagagctggcatgccagcccgtcagctatgttccgctaggacagcgttatttcttattttaatccctctccggccggtttcccgccggcctgtttaccctctattgccaacttgatttcatcctgccgcccgttttagtgtatattagtagttgacaaacaaatgaaatgtaactattttggttacaatggtggtgaaaaacatgattaacagccgtcttgctgtggccattcacattttatcgctgatctcaacggatgaacgggcgtcatcggacatgattgcgggcagcgtaaacaccaatcccgtcgtagtgcggagaacgatcagccagctgaaaaaagcgggtattctgacatcccgggcgggtgttccgggagccagcctgaaaaaagatccgtcggagatcaccctcttagaggtttacagggcggtgcagaataaggaagagctttttgcggttcacgacaatccgaatcccgactgtccggtcggcaaaaatattcagcgcgcgctcgatgagacgttcggaagcgtacagcgggcaatggagaatgaacttgcgagcaagtccctttatgatgtaatgaatcatctcttttgttaaaaagagatgggttcatgccgctagacgtgtaacggaaatggttacaatgggtaatgaggaaatcacggttttggctccatattcagacaagcctggatgcgggattgcgatctgtttaatgaagaaaacctccgaaactaaaggaggtggtaaccgggatatttttattttgcttaaggcttatgtgaaggtgtctgttgtaagcgggttaccaaaaaaagacggaactcttattttaatacgcgctaaaaaaactgatggagaatatcctgcctccggtaatgccaaaaccgttcgcctcttcacaatcattataaaatttctcaaggaacgatcagcagcccgttagctgcccctcattagagatgagctgttaccacactgttacattagaacttccgctgcttttatatccttctgtcgctaagacttgataagcccaattactgcccagattcattccatggctcttccatgcgttaacatgattgctgaaagtgattgcagcgttgcttccggtcggtctcttcgactggcggacactccagtactgcgtaaaagtagtgttatcgccatcaatggaaggtgcgttataacgtgtcgttgtatatatgtcatatgtacctccatcactctttacggtacctttatacgttccggtaggtctgtaagtaccccatgaatccaccacataatattcgatgaggggcgatctcgtccagccatataaagtcaaatatccattgccgttcggcgcccaaacaccggcattatagtttattgttctaaatggcgagcctgtagtccagcctttaccaacaacgaaattcccggtattagaccaattaacactgtaatttccgccagagccattgactgcgtttactgttccgcccccgtcagtccaattttgccagtaatctgtgccagctgcagaggcggttgccgaaaacatgctgatactcatgaaagctgccgttaatcccactaagaatttctttttaaacttaaacatatgttacctcctatactattttttctgactttgacatgaggcagcactcgtaaatatttaacgaacgccaacgcttttgatcgttcctttcaatataatagcatgaatacatgggtgaatattaagaacaattgtaatttaattacaaagacccaaaaaattgtatgatgagtggtcttgtaccgccatagccttatttcgcagaactcagtgatttcagttaaaactctgaggaaacgttttatttgaaaaaacttttttgccgaaagaatatctgcatacagcgtcaatgctgttcgccgtattggcaaatccgaagcagaaaaactttaccgttgtcggagaagcggaataagaaaaaatcccgggcggatgcgccgggattttcctttttaatatgtattggcatcaatattattaaacgcgtcgtccacgatgccgagcgtcatgaggacaatgaaaagaacgataccgagaacggacaagccgaccgtcacgatcagatagatcccctgcattttcacgaactttgcataattctccagcatatgttcctctgtcagttcattgaactgcgccgccatctgtcccgcttcatttgccgagcgcatcagaaaaatgccggcaatgatctgcagaacgccgggaatggctccgattaaaaagaaaaacgcgcccgaaagcgccgcaaacgcgcctataataataaacaaaatacctgtcgcttttccccatttcgaaatagaaataagcgaacgattcactgattcaggtttcaaaccatggcactcctttacaaaaaaatactcacttttcatttatacactattcggtcattcttttgaatataaaatgtgttttttcaagctgtgtccgtttttatatcagaaaattcccgagaaacatcccgggaattacaaaatcggcgacagaagccttgaaatcgattctttaatgcggatccgcagcgaacgctcctgatattcttcatacgtatattttctggagacgagcagatcttctttaaatgaggaaatgagttttttcgcgatggtgacgtcataaataaaggcgttgacttcaaaattaagtctgaagcttctgacgtcgatattcgccgtaccgactgaagccgtctcatcatcgacgacaatcgtttttgcatgaataaagccgttatcgtaaatgtagactgaggctccggctttcaaaagatcgccgatgtaagataaagtcgcccagtaaacgaaagcgtgatccggcttgttcggaatcatgattttgacgtcaatgcctgacagacaggcgatcctgagggcatccaaaagacttgagtcaggaataaagtaaggcgtctgaatcaggatcgaccgtttggccgttgagatcatcttgatatagccgtttttaatttgttcccattctgaatccggtccgctcgtgacaatctgcatcccgacattgcccttcggctcgcattccggaaaatgattcggaacgtaagtgagcgtatggtgatgggaagcttggttccaatcgagaataaaccgtgtctgaatggcgtgtaccgccgtgccttgaagtctgaggtgcgtatcgcgccagtagccgaatttcggattcaggccgagatattcatctccgacgttaaagccgccgacatagccggtttcgccgtcaatgatgacgagcttgcggtgattccgataattgagccgcaaattaatcggacgaagcctggaaggaaaaaagacttccacatggccgccggcgtcccgcagcggtttgaagaatttttttctgagtgatcttgaaccgagttcatcatataacactctgacctttacgccttcccgtgcttttttcactaaggcatcgcgcaatttttttcccagttcatcacctttataaatatagtattgaaggtgaatgtgatcttttgcgttggaaatgtccttcattaagcgtttgaacttatcgcgcccgtccgttaaaatctccaccgaattatcctctgtaaagactgcgtggttgttcatgacaagcatatagatgaggtctttattatccacagtcgccctgttgttaaattggaattgcctcgacttcagatctttcagctgaaacttcagcagcttttctattccgatttttttacggtcttcccattgaaacaggtgcttgcgtctcaggttatggccgaataacaggtataaaataaaccctaaaatgggaataaaaaaaagaaccaagagccaagcccatgaagcgctggcatcgcgtctttctttgaaaatcatgatgacggccaaaagtatatttaaaacgaaaaaaaatccgaataaaataaatgaaatgctcactttgcaaccccgctatatcatatttatcaagactgtgcccattagtattccgacaagtgcagcaatctgattcccatttcaaattataacattgacattttgaaagaataaagagccggaatcaaagatgaatgcagttttctttcaaagaaagttccgggtgcggtaaaatatgcatatatgaaaaagaagacaaaaatgacagcaaaggggagagggcatgaagctggagcatgcggaacaattgccgggattcataaaaaaagaaattcagaaaatacaaatcgccatcgcgccgctgatgaaaaaaagcatcatttaccgttttcttgctttcccgctcgccgcttttagtctgtttcatctggcatcgcttttgattcaggccccttccgggagaggagctctcgtatcggccggcatttttgccctccttgcggctctgggtcttgcgttttttaaggaagccggctatcagcggaaacaggtgcaaaaaacgatccggctttatatgctgaacagaatcagaaaaagcgatattctgtccgaggaacggaaaagcgcctacacccggctgattgccgaggagccgtctgcgatgaagagctttattgaatttttaacggaagaagaccggaaaaaagaaatgctgtattaaaaaagagctgacgcgcgatcagctctttttgtcattcaaacacaggatcgttctcatagtaatatgaatcaggcgtgtcatacgtatcagtgctgtaataagccataattccgatgacagcgaagatgacgactaaaataaaagcgagaatgcccagtaccacactggatgccgcgtaaaaaaactgcattttgataaatgacgcataatgtgcaagcatattttcttccgcgttttcttctagcccttcctgaagggcggcagccgcttttgccgagcgcatcagcatgacgccggaaatgatgagcagaacacccggaatggctccgagcagcgtcacaatggctgacagagcggaaagagaacctgtgatgatcagaaacacggcggtgatctttccccatttggcgatgtcggcaagggaacgggcttttttattgagcggctggttttcgtctttgtctttatcgatggtgatcatgacagttctctccctaaaatgttcaagtcatatcgttttccgtccatttcggcgatacccgggaatacgccccattcggtaaaaccgaatttttcaaacagcttaatgctcggcacattatgtccgaagataaaagccatcaggctgcggatgccgattgccggagcgagtgccagggcttctttcagcagaaagcttcctgctcctttgccgcggcaatcctgatgcagatagatgctgatctccgccgttttgtcataggccggacggccgtaaaacgtttcaaagctgatccaggccgccactttgccggtttcatcttccgcgaccatcagcgggcgccggtccgtgtgccgcaaaaaccaatccatctggtctgcgggcgtcacttcttccgtatcagccgttaccattcgtgaggcaatcgtcgagttgtatatggccaccaccgcatctaaatcctccaatacggctttgcgcagggttaaattcatattccgggatctcccttcacatttcattacataattaagtgcaatctgcacatactacttctaaaaaagttttttatggatgtgtatatattttcagaaaagtgttcagaatgttgctgaggtgatgaacaaatgagagaggaagaaaagaaaacttctcaagtcaaaaaacttcagcggttttttcgcaaacgctggatattccctgcaatctacttagtcagtgcggccgtcattttaacagctgtcctttggtatcaatccgtttcgaatgatgtgaaggacaatctgacgaacaacggcggaaactccgcgtatgacagcggcaaagacgatgccgtcgaagtaggcaagtcaatggaaaacgtcgcaatgccggctgctcattctgaaaatgtttctgttgtgaaaaagttttacgaatctgatgccgcaaaaaaagagaaagaagcagcacttgttaactataataacacgtacagcctcagtaaaggaattgacttagctgagaaagacggaaaatcatttgatgtttctgcttctctgagcggtacggttgttaaagctgctaaagacccggtactggggtatgtggttgaaattgaacactcagacggcctgtctactgtctatcagtctttatctgaagtcagcgtggaccagggcgacaaagtaaagcagaaccaggtcatcggtaaatccggaaaaaatctttacagtgaagaaagcggaaatcacgtgcactttgaaatccgcaaggacggcgtagcgatgaacccgctcaattttatggacaagccggtaacatctattgaaaaagcggcggctgaagagaaaaacgctgtgacagaagaaacggaagggtcaattcagcagtcttccgagaaaaaagatgtgacgcctaaaaaagaaaccgaagaaaaaccaggtgacaaagaagacggcacaaaagacaagacagatggtaaagatgacggctcaatgaaagattcgggcaagtaatcttgatcccaaagcgtctatcagctctgataggcgcttttcatattgctgcatgtgcctttatactaatagaaaacgaaggagatgctgaatgaataaatgtctggcggccgggtggctcgtctttgttttcgtttctgctttgactgaaagctttcacgatatgattgtgtcgcagacggtgtccttccgtttcacgtcccatccggatgtgtccggtttctttgtgttcgatatggcggagctcgccataccggaagcggcgattcaaaagctcgggcacgcgttttcattttttgtgctcgcctatttgtttttcagggagcgcaggcgcatgaagagggcggtgctgtatgcattggccgccgctttcctgacagaaatcgtccagctctttttcggcagaaacggatgcctccgcgatgtgctgattgacagtctcggcattgccgcattctgggctttacaaaggaaaaagcatacagccaaacatacaaaaaccggcagtctgtgacagacgccggctttttttatatattatggtttgtcgatttgcttttatgaacgatactttcatagattcgcacgatcagatcgacaatcggacgaagcacatttgaaaatctgaacagcaggaatccgacaatgagggaaacgataatgcttccgagcacatcgatcggataatgatggccgacccaaattcttgagaagccggtcaaaaggccgaaaatcacaagcggccagccgagttttttgttgcggaacagaatcgcaattgaaatcgccaaagcgcctgtcgtatggtcactcgggaatgaagcatccgcggcatgagggatcagcgtatgaaccgtatgctcgacaaaggggcgcggctcgacatagactttcgtgatgaggtagttgatgataagcgccgcaacacccgtgaagcccgcgtacagggcgttttgtctgccttttgtgcttccgaacagccacatggcaagcaggaaaagggcgtaggcgtaaatggcgtattccgttataaaaaccatgatagagtcgagaatggcactatggtgcgacaaaccattgatcgctttaaatagttcgtaattcacaaatatcaccttttatctttattttatatgaacagtgtaatgcttttttctatgagacacaattggtattaaaaataatcataaaaaagtaaacagaatgaaacgtgactgtattactgtgcgtcaagtatgcgggaaaagaatagccgaaggagttttgtccgttgctgaaacgtttgaaaaacgccgatctgccgcttgtgtttgtcattatgctgctttgcggattcggcttgttaatggtgtacagcgccagtgatgtgatggggtctcagcggtacggagatccatcctatttcttccataaacaaagtgcctctttactgatcggattatgcttatttctatttgccgcctgtctgccgtataagcggtatgcgcggcttgtaccgctgtttgtggtcggttcgctggtattgctgctgctcgtattgataccgggaatcgggctggagcggaatttttcccgcaggtggctgggagcgggcccgcttgtcgtacagccgtctgaattggcgaagatcgccatgattttgtatttcgcttcggtttatacgaaaaagcagccgtacattcatcaatttgtgaaaggggttctgccgcctttagtaattttggggaccgcttttctgctcactttggcggagcctgatttagggacggcttccttaatcctggcggcgtgcgggtcgattttattatgtgccggcttgaaaaagcgccatcttttcgtgctcggcgcgacggcggtgtcgggggttgtttatctcgcattttctgcatcctatcgtgtgaagcgcctcgtttcctttaccaatccgtttggtgacgcgaacggggacggctatcagctgattcaatcctattttgctatttccggaggcgggtttttcggaagagggcttggaaacagtgttgaaaaaatgaactatctgcctgaggcgcataccgatttcattatggccgtgatcagtgaagagctggggatattcggtgttctgatcgttttgggattatattttgcgttaatgcttctcggcgtaaaaacggccgtgcgggctgatgacccgttcgggaagcttcttgccatcggaattacgtttcaattaatgtttcaggttgtcttgaatttgggagcgatgagcggactcctcccggttacgggtgtgccgcttccgtttatcagctatggcggttcttcattgattatgacgctgtttttgtgcggcatactggtcaatatcagtacatatgcgaaaaaacaaaccgtacggcataagcgtcctgccccgcatgaaaaaaaggcttcttctttttaatgaagcccgaaaaaaacgcccgggacatgctgtctccgggcgttctgtctgtttataaagctcctggtccttcttctccggtgcggatattaatcgtgtttccgatttcatagacgaatattttgccgtcgccgggctctcccgttttcagcacttttttcgccgtttccaccacttgatcaacggggaccttgctgacaacgatttccactttcagccgttcatatacattgctttcaattttgactccgcggtacagttcggtgtgagctttttgaaggccgcagccgtgtacgttggagaaggtcagcgatgtgactccgattttaccgagttcctgtttcaatgtttcaaacttagccggacgcgtaacgatttctaccttgaacatttgaccgctcatctaagccactcctcactttataagtcctgatatgctttttccccgtgcatcgttaaatcaagcccaagtgactcttcttcttcgctggcgcggaggggaatgaacagacctacaattttaatgataacgaaagtgacaataaatacaaatacataggttgccgcaatggccgcaatctgcttccagagcagtcccggatcgccgtaaaacagtccgtttgccccgccgtcattgacggaagtggtggcgaataaaccggtcgcgatgccgccccatgtcccgccgattccatgcaggccgaaagcgtcaagcgcatcatcgtatccgaaagtctttttgagccaatacacgccccagaagcagacaagcccgccgatgaaaccgattacgatggaagagaacggcgtaacgaacccggcagccggcgtaatggcgacaagcccggcaatagcgcctgatacagcacccagcatggtcggttttttgttcagcatccattcgattaaaatccagccgataattccggccgcagccgcggtgtttgtgttaatgagggcaaacatcgcgatactgtcaagcgtgagggcgctgccgacattgaagccgaaccatccgaaccaaatgagcgccccgcccaagaacgtgtaaattaagttgtgaggcgaagccgccgtgccgtccttgcgtttcccgagcacaatcgccagcacgagcccggcgaccccggaagaaatgtggacgacgtttccgcctgcgaagtcaagagcgcccatttggccgatccagccgccgccccatacccagtgcgcaacgggcgtatatacgagggaagcccacaaaaaggaaaatacaagaaaagcactgaatctcatgcgttcagcaaatgctccggaaataatggccgtcgtcagtacggcaaacgtcatttggaacatcatgaataatgaatgcgggatcgtatcactataacttccgggttcaaagccgacccccttcagtccggcccattcaatcccgccaagccatgtattcccgggggcaaaagcaagtgaatatccgtacaaaacccaaacgacggatacgatggcgagggaagaaaaactgtgcatcgccgtgctgagcacgtttttgctttttaccattccgccgtaaaacaaagccagcccggggtcatcagccacacgagtaaagcgcaaaagaacataaatactgtatcgcccatctgcatgttgtattcctccgtctcattcaaaatgtaatcgtgattaattcattattatagagaaaaaagaacgataaaacattttcgtgtaaggttatctgacatgtttttttgcgttcataatgtcgctttttcaaaggggtgtcatgcgactttatatccataaaaagagcgctggagcatggcggaagaaatcctgtccgggaaagagtaaaataaacggggtgagaaacactaactgcatcaggaggaattattatgacaacatcattgaatctgcaatttgaaaaaacggctttggtccttattgatttacaaaaaggcattgtgccgatggataaaagcggtaccgttgtgccgaacgcgaaaaaattaattgatgtgttccgggaaaaaggcggatttatcagctttgtgaacgtagattttcatgacggagcggatgcgctgaagccgctgacggatgaagaggcggcgggccattcggctccgccggcggattgggctgaatttgtgcctgaaatcggagtgaaagaaaacgattatacggtaacaaaacggcagtggggcgcgtttttcggcacggacctggaccttcagctcagaagacggggaatcgacacgattgtgttatgcgggattgcgacaaacatcggtgtggaaagcacggcgcgggaagcttttcagctcgggtatcagcaagttttcgtaactgacgcgatggcgacattcagcgatgaacagcacgaagcgacactcaaatttatcttcccgaaaatcggcagaagccggacgacggaagaatttatcgcacagacaaaatgacaatctccaaaaaaagccgcgtcctgttcttgacggccgtggcttcggggacgatgctgaacccattgaactcgtcgatgatttctcttgcgcttcacagtattcagcatgaatttcacctgtcgtttacaacggtgtcctggctgatatcgtccttttatcttgccagcgcggtggcgcagcctgttaccgggaagctcggtgatatgctcggcaggaagaagctgtttttgatcgggcttctgcttgttgccgtctcggcggtcggcgcgccgtttgcgccgacttttatgacattgctgatcatgcggctttttcaatcgatcggaagcagcgcgatatatccgtccggcgtcggattgatccgttcaaatatacaggagaagcaggcttcggcgctggccgtcctgtcaatctttgcatcagccatgacggcgctcggtccgactctcggcggttttctgatcgtttggggagggtggccggcgatctttttcgtcaatctgccgtttatcatcctcagtttttttctcggaatgtatatgtttccgaaagatgaaaaacgcgagatcggcggcttgaaaggcgtgctccgccagcttgatacaatcgggatactcctgtttgccggagcgattatccttctcctgtcgtttttattgtccttcagtacgaagcctcactatacagaaggcgtattcgggcttttatttgtcgggctgtttatctggcgtgagctgaaaacagagaagccgtttattgatgtcaggctgtttaaaacgcatcggaaactatcgtcggtgtatattcaatttattttgctgaatatattcttttactgcatctttttcgggcttccgagctattttcaggatgaaatgcatttgtccgttcagacaagcggattgattatgctgtttatgtcgggcatgagtattctggtgtcgcctttgaccggaaaatggatagataagaaagggcttcttcagccgattgttgccggaacctgcctgaccgcgatcggagcggtgctgttaacgtttttcttccttcaggcgcccatgataggaaaagggctgatcctgtccgtgctgggtgtcggctacggtttcggaaatgtcacgtttcaggcggccatgctgaaaacgagccccgccgacatggtcggaacaacgtccggcctgtttcagacctgcaggtatctcggttcgattttgtcttctgtcattttgggcattcttttcggaaaagaaattaccgccggccattttcatatgctcggcacgattcttatcgttgtcggcgccgtaagccttttgatggcgttccggttttcggttctcctcaaaaaagcctcttaacaggcgcaaaaaaaagagacgggctctccccgtctctttttttgtgtaatgtgctcaaaaatcaaaacgattattgtcgacagcgaccaatgttatttgcggaattttcagttatattttttcacatgtgatgtaaggaaaacgtacatgcaggagggagaaaatgacaaaaataacgagtgatcggctaagcaacaaagatttactgcctttagaagacggcgaacggacatggaaggcggtgaattttgcatccatctggatgggttgtattcataatatcccgacctacgcgactgtgggcgggctcattgcgatcggcctttctccgtggcaggtgctcgccattatcgtgacggcgtcactgattttgttcgccgctttggccttgaacggccatgccggaacgaaatacggcctgccttttccggtcattatcagggcttcttacggaatatacggagctaacattccggcgcttctcagggcatttacagccatcatgtggctcggaattcaaacatttgccgggagcactgccttacacattctgcttttgaacatatggccgggctgggggagtctcggcggagattggaatatattcgggcttcatctgccgggctttctgtcgttcattttcttttggggcattcatctgcttgtgctgcggcacggcatggaatcgatcaaaaaatttgaagtgtgggcgggcccgcttgtttatctcgtcttcggcggcatggtctggtgggcgatagatattgccggcgggctcggtccgatttactcacagccgggaaagttccatacattttctgaaacgttttggccgtttgccgccggagtgacgggcattatcggaatatgggcgacgctgattctgaatatccctgacttcacccggttcgccgcgtcgcaaaaagaacagattcgcggccagttttacgggctgccgggaacgtttgcgctgtttgcgtttgcaagcatcacggtgacatccggatcacaggtagcattcggagaaccgatctgggatgtggtggagattttggcccggtttgataatcctttcgttatcgctctttcggtcatcacactttgcatcgccgccgtctcggttaacgtggcggcaaacatcgtgtcaccggcctatgacttggcgaatgtcctgccgaagtatattacattcagaaggggagggtatttgaccgccgttttggctctgttcacaataccgtggaagctgatggagagcgccacgaatgtatatgcgtttctcggactcatcggcgggatgctcggaccggtggccggggtgatgatggctgattattttatcatcagaaaaaggcagctctcagttgaagacctttattcagaaaccggacagtacacttattacaaaggctataattaccgggcctttgccgcgacgtttctcggcgcgtttatttctttaatcgggatgtacgtcccggcgttcgccggcatctatgatatctcctggtttgcgggtgtcattttgtcatgtctcggttatacggcgcttatgtacattcatcctccttatgcaaaagcggagggacgaatcgtgcgggaaagagcggccgaataaaaaaagccgggggctgcccccggctttttgtcatatcagtctgcgattgaaacgtttccgtccgcttcaagcggcgttctttttttctggctccagccatacaggagcaaagcaatcaggacgaacagccccgctgccagataaatcgaatggaatccggccgaagcgacgaagaggccgaatacatatgacccgccggcaatcccgctgtcaaagaaagtgaagaaggtcgccgtcgcaaagcctgaacggtgtccgggcgaattctgaatcgccagcgtctgcatacacggtacgatagagccgtatccgagaccgattacggcaccggacaagagaagcatgagggcgctgtttgtcatcgccagcatgcaaagccccgcggagaacacgataatcgacggatagatgacgattcccggccccactctgtcaaacagctttcctgtgaaaggacgggcggccatcatcgtcacggcgaaacagacgaagaaatagccgctgacatccaacaggtggatcgtctttgcataaacggataaatatgaagtcacacttgaataacagaaagaaatggacaacccgacaatcgcgattttaagcgcgcctttttcaaacatgtcggagaaagaaaaacggaacacagtcgttccgctgttgttttgatccggcacacgaatcataaaagcaatcagcaagcctaaagaaacaaatacagcaaaaagcgtaaagaacaccgggaacgatatgactttcacaaggctcagtccgagaaacggaccgatcgccatggcaaggttcatagacatcgcaaaataaccgagcccctcgccgcgccgcttggcgggaataaggtcagcggcaattgcgcctgtgaccgtcgttaaaatgctgaaccagatgccttggaaaaaacgcagtccgagcagcagatagaaattgtgtatcggcaaatacagataagaagacagggcgaacagcgccagagatacaatcgtcattcttttcttaccgaaccgttcaataatcgcccctgaaaaaggacgggtgataatagcagataacaggaacaggctgatcaaaagccctccttgcgattcactgccgccaagctcctgaatcatatagataggcagcacggccaaaaatgtataaaagaacacaaagacaaataaatttacgagtacgaccataataaaatctttggtccagatcgagtcagatttactcaaaagtacagcacttccctttctttattatttcgttaaaaacacattcagaaactcagaaaaagcttccttatctccatcttggaaatccgcaagcatgtcttcctcgaacttcagcatctcttgattgatgctgttgtatttcaattcagcttccttcgtcaggacgacgagcttttcccgcttgtcttctccctgttcccgctgaatccagccgttttcttcaaggcgtttgatcgttctggtaacggtcggcgcctctacgttcagataagaccagatttctttttgggtcatcggtccgatcgtttttaagcaatataggattgaccattgagaggagtacaggccgaatggttccagccgttcattggctttcttcgtaatcaggcgggcgcattgattgatttgatgaatgaggcgtctgttgacgtggatcatttccgttctccttttcaaaaaacttacctaagtaactaattgtgctgtttcattctacagcaggatcgcgcggatgtaaaccccccgttcaaaaagcagaaaattatgacccgccccttgtccttattgagtttttagcatattcccaattcattgctaatacactgttacaaacctatcaaagagagtgtttgaggtgagggatcgtgggcatatttctaaaaccttcttatataatcggacaacgaagaagctgcatcatcagtgaatctgttacagaatacggatctcatttcacacttctcacatccaactggggaggtcgagtggtgtgcacgattacatcaaagagcgaacaatcaagattggtaagtatatcgtggagacgaaaaaaaccgttcgtgtcattgcgaaagagtttggtgtttccaaaagtaccgtacacaaagatctgacagaacgcctgcctgaaatcaatcctgacttggcgaatgaagtaaaagaaatactcgattatcataaatccatcagacatttaaggggggcgaggcgacgaaattaaagtacaagaaggatgaaattcttgaaggggagcccgttcagcagccgtagcgcctgacgtctgccgggcccttttttctcctccgggcggtttcgcgaatatccgcaaaattttgtcaagaacttatatcgatcagcagcttttttttgataaattatgataatatatataattagggcacaatgtggatattttactgtgaaacagatatcaaggaggatataaatagatgtttgcaagggatattggaattgacctcggtactgcaaatgtactgatccatgtaaaaggaaaaggaattgttctgaatgagccttccgttgtggcacttgataaaaacagcggcaaagtgctggctgtcggtgaagaagccagacgaatggttggacgtacacctgggaatattgttgcgatccgtccgctgaaagacggcgtaatcgcagacttcgaagtaactgaagctatgctgaaacatttcattaataagctgaatgtaaaaggacttttctcaaaaccgcgtatgctgatctgctgcccgacgaatattacatccgttgagcagaaagcgattaaagaagcagctgaaaaaagcggcggaaagcatgtgtaccttgaagaagaaccgaaagttgccgctatcggcgcgggtatggaaatcttccagccgagcggtaacatggttgttgacatcggaggcggtacgacagatatcgcagttatttctatgggcgatattgtcacctcctcttctattaagatggctggggacaagtttgacatggaaatcttaaattatatcaaacgcgagtataagctgctgatcggtgaacgtaccgctgaagatattaaggtgaaggtcgcaacggttttcccagacgcacgtcatgaagaaatcaccatccgcggccgtgacatggtttccggcctgccgagaacgattacagtaaacagcaaagaagtggaagaagcccttcgtgaatcagttgccgtcattgtgcaggccgccaagcaggttcttgaaagaacaccgcctgaattgtccgctgacatcatcgaccgcggcgttatcattaccggcgggggagcgctgttaaacgggcttgaccagcttcttgccgaagagctgagggtgcctgttcttgtcgctgagaacccgatggattgtgttgcggtcggaaccggcgtcatgctggataacatggacaagcttccgaaacgcaaactgagctgatgataaaacctcattctgaaaaagaatggggtttttttctgtcaaacccttcacgaacgggaatgtaaatccgataataagaaaaaatgctgattttcattatagaacaaatgttccggtgaggcaactggaaataatgctatttcagaggtggaagacttgttaaaaggattatataccgcaacgtccgcaatgattacacagcagagaagaacggaaatgctgtcaaataacatcgcaaacgcgaatacgtcaggatacaaagaggatcaaggttcaatccgcgcctttcccgagatgcttctgagccgaatagaaggcgataaaaaaacgaaaatcggttccgtcaacacaggcgtatacatgcaggagctgaaaccgttgtttacgcagggaagcctgaaaacgaccgatcagccgacggatatcgcgcttatggagaatcaggttcccaagaatgccgaaacgaatgaaaacgccgagctgttttatcccgtgcagactgcgggcggcgtccgctattcaaaaagcagcactttctcattaaatgaaaacaatcagcttaccataaacggaaaccttgttttatcaacaaacggacagccgattacagtcgacaatgaaaaattcaccgtatcagaaaacggaacggtcacgacaaacggccggccggcggggcagattgacatcaggatggaagaagacgtgcgcaatctgaaacgggacggcaatgacctatacagcacggccgacggcactgaactgccgagcgcggcggcgaatccccaggtctcgtattcattaaagcaaggcgtctcggagctttcgaatgtggacgtgacgagcacgtatacagaaatgacggaagcatacagatcatttgaagccaatcagaaagtcattcaggcttacgataaaagcatggataaagccgcaaatgaaatcggcaaagtgtaacaaaatgggggacgttcaattatgatgctcagatcaatgctgacggcttcaacagccttaaatcagcttcagcagcagatggatacagtcagcagcaacctttcaaacagtgatacgacaggctataaagcgagggactcccgcttttccgagctgatcagacagcagtatgaccatatagatgacaaaaaggaaaattcgccgaacatgcggaaaacgccgcccggcctgcgtctcggcgccggaacggtcatgactccgcagctggactcagggcagggaggcatcaaaaaaaccgaccgtgaccttgatatcgcgttcacctcaccttatcaatatcttcaggcagaagcggacggacggcgggtgtatacaagggacggctcactttccctcaagccggccggcggaaatgaccgggtgcttcagctgttgacagcgggaggcaatcccattctcgatgagaacggccagcccatacaaattgacagttcgctgaatcagctgaaaatcagcaaaaccggaacgctgactgcttcagacccggcaggaacccgttcgcagacgtttaatctcggcatcgtcaatgtcaataatcctcaggcccttcatgcggaaggggataatctgttttccgtaaacggagcgggggcatcagcgattgaagagcttaccggcgcaaaccggcaggcaatcggcatggagcagggcgcgcttgaaagttcaaatgtcgatatgtcaaaagaaatgaccgacctaatcgtgtctcagcgttcctatcagctgaacagccgcacgattacattgggagaccaaatgctgggcttaatcaactcagtcagataaaagaaggggcgttttgatcagccgcgcatgataaaaaatgcggctttctcaaaatcgcccttttttttgtagtaatcagtaatatcctgaagcagcacttccaaatccacccacgcttcaattttctgcagctccagcacgagtttctgcaatcggtcgtacgggtcctcctgagcggtgtacagtatgttgagcgcggtcagcttcaatttcattatcttgttctgcactttttcagatatgtataaacctttctgcagcacggtttgtccttcggcggcatatccggttttaaaaagtgctctgaccgcttcgtatacacaatgcaggtaggaaacgggagactctttctcgaaacgctgattgcccaatacctttttgtaaaaagggagggcctctttatcttttttctgggcggtctttaaaaaaccaaaattataataggcgtggcacagcaggttattgtcattgatccggtccgttatctttatggattcattaaagagctgttctgcgtcttcatagcgtgcctcgtctatgtaattcacggcgagaagcagacggcagctgagcgtttttttgatgtaaccgaattcaccttgatagatttccagcgctttattgacatattgaatggagagcgcaggcgacttcatcatgtaatatgcacccgctgttttataataaaattcagcggcttcgaaacggtcctgaatggccggcaggtactgttcagcttctttaaagcggcagacagcacggttcggagcgccattcaccatatggaataaccctttgaaaaaatagaaataataagttaattcatggtccatctcatctttgcgccgcttcagctcgcagaacaatttagtcagaccgtcttttttctcaaacagcagctgaaaccgtgcgaaaaacagctgatatctgagtttgagctttgcattcttttgtaatttggggagatgctgattgatttgttcgtgaagggaacgggctagatcgaattggcgttttcccatggcgtcataccactcattcagcatcaccagcgtacgtttttcagtaaacttagcaatcatcttccaacctctttgcatagggtaaaaatctttatttatcataacacattaatggacgaggctcattgccagctggttacagtttacagcgcggttgaaaaagaaattgattcataatatacttccaaatgtacagattggttagcgcatataccttctatacatactattgtcgatgaaggagatgtcaagaaaatgcttgatactcagcaaattaaagaaattattccccatcgctatccgtttcttctggtagacagaattacggaagtcgaagaaggaaaacgggcggcgggatataaaaatgtgacggcgaatgaagattttttcaacggccattttcctgaataccctgttatgccgggcgtcttaatcgtagaggctttggcgcaggtcggagcggttgcgatgctgattaaagaagaaaaccggggcagactcgcattttttgcggggattgataactgccgtttcaaaaagcaggtaaaaccgggtgacaagctggagcttgaggttgatattacccgcgcgcgcggtacgatcggacgcggcaaaggcgttgccaaagttgacggcgagctcgtgtgtgaagctgaattaacatttgcgctcggagaataaaaacaaacgaatgggcttataaaaaagcccattttgtatagaaaggggtgaatgtaatgtggtcagaatttaaaagctttgcgatgcggggcaatatcatggatctggcaatcggtgtcgtcatcggcggcgctttcggcaaaattgtgacgtcgctcgttgaagacatcatcatgccgcttgtcggcctgcttcttggcggtcttgacttttcagggctggccgtgacattcggcgatgctcatatcaagtacggaagcttcattcaaacgattgtgaacttcttcattatttcattttctatctttatcgtgatccgtacaataggcaagctgagacgtaaaaaagaagcagaagaagaggctgaagaagcagaagaaacagatcagcagacagaactgctgactgaaatcagagatctgctgaaacagcgggctcctcacaatgactaaggcacaaaaaaaggctggatgattaacgtccggccttttttatgattataatttttgtttaaacgcttcaatcagccggctgcccgagtagccttctttcacgagcgactccagaatgctttctgatccggggtggtttcttgacaccatttgaccgtaaattaaaacttgtatactcttttccagctccacaatatttttgatgcttcccgtcagctgggcggggcggttgctttttttcgtaatcgttacaaacaccttcgcttctttctggcttttcatcagcatgtcaaaaaaagaaaagtgttcggccgggaccagtgcttcaattaaccagtggttttctccgtcctctttgttgataatcaatccgtctaaaaggggaaactgttcaatcggctgatcgtctttatctaaacgttccacattcagatcaaccagtttaaaggttttcatctcttattttcacccctgttgtccatgtttttcgttcatttattataacacatatcatttttcccgggaaaatgctgtaagacatgcttcatcatttttgtaggcggtcaacatttaatcatttctattttttcattataatgtaaaagaatatggtcatggagagatgcttatgaatcaattgcgcctgaaggaaatctatatagaagacggttcaaggcgaaaagacgatcattcctacttggtatgcaaaaaggaagattgtgaggtgcatcttaacagaaggggaaatgtcgtctttttatatgaaacaaaagaccgcatggaacagtataaaattcagctttcattgactgataaaaagctgagtttttactggttcgcatgggacggcggaaagtttgtccgcatgtttgagaaagactggctcaaaacgaaacttttctcgcggctgctcaaaaatacatattacataagcggtcaaaaacaaaagttttttttatcagaaagaaaaacaaaaacataaaagcagcccaaacggataaaggctttttccgctttttgctttcataagcctttatactacaatgaagccagcctcgaaaaagagaggaggagacggcttgtttaaccacgttatgcttgtcggccggctgacgaaagacccggagctccgttttacatcagcgggcattcccgtcgctcatattacgttggcggtaaaccgcaattttaaaagcgcgtcgggtgaaaccggaaccgactttgtcaactgcaccatctggaggaaaaacgctgaaaacacggcattgtactgccaaaaagggtcaatggtcggtgtaagcggcagaatccagacgagaagctatgaaaagacagacggcgtaaaagtttatgtgaccgaggtcatggctgataccgttcggtttatggatcaaaaacggaaagagccgctggctgaatagcatgcttttttcctcgatttcccgcctttcagcgggccccgcaatacctccttcccattcgccagtcgaaagactggtttttttgtgcgggagctgaaaaatggttaaaaagaagtgatttcgcttataaatacttaaaaacattgaatatattgggataaaaacttataattacttacagataagtgacgaaaaaaagggaatgaggacgtgtatcaagaagaaagactgattgcgataatggaatatttgaaacagcaccggcggatcaccgctgaacagatatgttcgctgcttcatatttcaagagataccgcaagaagggaccttgtaaagctgaaagagcgaggggccattatcagaacacggggcggcgcgattctgccgtcagtgaatcaggaagttccgggctattcgggccggctgaaaaccgtttctgaagagaaaaacaaaatcggcaagctggccgcatccctgattcataaaggagaccggatcatcctggacacatcgacaaccgttcaggcctgcgcggagcatttaaatgtcaccggctgcactgttattacaaattcgatcaatcaggccgatatcctttccgcaaaagagggaattgatattcacctgctcggcggaaagctccagaaggaacaccggtttttatacggggcttccgttgtagaaaaactgggggattatcacgctgataaggtgctgatcggcgttgtcggcatctcggaaaacggcctgacgattccgcatgaagaagacggcatggtaaagcgtaaaatgatccgtcaggctgaacaggtgattgcgctgagcgatcactcgaagcttggccgtacgagtttttatcagtatgcagacctgcacgaggttgacctgctgattaccgatcggctgcctgatcaggatttttgcgatctgctcgaccggcacggcgtagaattgcttgtaactgaatctgaagaagaggatgaggacatgtgaaactgattgccatagatctggacggcacactgctgaacagcagtcatcaagtaagtgatgaaaacaagcgggctttaagggaagcccggcaagcgggaattgaaatcgtggtttccactggacgcgcgcattttgatgtgcactccatatttgaaccgctcggcataaaaacatggattatcagcgcaaacggagccgccatccacgctcctgacggcagcctgtaccattgtgaagcgattgaagaaacaagagcccgggggattttgtcatggcttgaagagaatcaatattattatgaggtgtttacaaacaaagccatctatacgcctgaaaccggcaggcagctgctcgatatcgaaatggaccgggtgaaaagcgccaatccggaaaccgatctttccgttttggaacaggcggcttcagtgcaatacagccagtccggctttgcttacattcattcataccgtgagctctttgagaaagaagagcatctggatttttataatattctcggattttcgtttgatgagcggaagctgaaagcgggctgggaccgattcagcggtcagaaagatctcacccttgtcagctctgccgatcacaactttgaagtggcgtctcgaaacgcctcaaaagggcaggcgctcaaacggctggcgcaaaagctcggcattccgatggctgaaaccgccgcggtcggtgacagcttaaatgactattcaatgcttcaggcggccggaaaaggcatagcgatggggaatgcgagagaagatattaaagagatcgctgatgccgttacattgacaaatgatcaaaacggcgttgcgtatatgatcaggaatttactgtgaaaggtatggcgatactgttcatgactggcgtgacgcattcatggcaaatgcggcgtaacagtaaggacgacataaaagaccggctcttccgagagagccggtctttttgcgtttaatgtgattgcgtcgatgcgctgagggtgaataattcttcaagctcatcggatgacagctcggtaatccaattttcactttggataatctgatcgttcaaagtttgtttcgtttcgagcatggcatcaattttttcttcaatcgttcccgtcgtaatgagtttgtgaacgtggacgaaccgttcctggccgattcggtaggcgcggtcggtcgcctggttttccaccgccggattccaccacctgtcatagtgaatgacatgattggcagccgtcagattcaggccggttccgcccgctttcagtgacaaaatcagcgtcgggtattctttcttctggaaccgttcgacgagggaatcgcgttcctgcttggacaggcttccgtttaaaaactgaaccggttctccgaatgttttttccaggaggcgcttcatcatgttgcccatctgaatgtattgtgtgaaaatgaggcagctttccccttgtccgcggatcgccgccattaagtcaagcagcttttccagtttgacggatctcccgtttaacagctctgtctgttcttccttcaaatagagcgcaggatggtcgcatatttgcttcaagcggccgagcatgctcagaatcagcgctttccgctgcatcccggtcagagaagccatatgttcaaatgtatctttgacaagctgttcataaagggatgcctgttcggctgagagcgggataaactctttttgttccagcttgtcaggaagattaagcgccacttcttcatcccgttttgtccggcgcagtaaaaacggccggattaactgctgaagctggttgattcttttttcgtcacggtctttttcaatcggcagcacatagcgtttatgaaagccggtcagactgccgagatagcctttgttcataaaatcaaagatcgaccaaagctctgtcaggcggttttccatcggtgttccgctcagcgcgatatgatggacgcctttcagctttctgattgcgcgggactgcttcgtatgcgcgtttttaatgttttgcgcttcatcaaggcagacggtgctccatgtcacggaagaaagctcttcctgatcggcgtgcgagaggccgtaagaagtaagaacgacatccgcgtcctgataggccgggacaaatgcttcccccttcggcctgcgggggccgtaatgaagcacggccttcagctgcggcgcgaaggtctggagctcacgctgccagttgccgagcaccgatgtcggcgcaatgattaaggcaggcgctttttgccggccgctttccttcacatggagaaaataagcgatcatctgaatcgtctttccaagtcccatgtcatctgcgagacaggcgccgaagccgttttcccgtaaaaacagaagccagttcatgccgtacatctgataagggcggagctggccctgaaacgcggcgctgacttcatgctccggcagatccccggcatccgtcagtttgcggatcaggcttctgagatgctttgataattcgatcttgatcccggcaaatgccgatgagtcaatgatgtccgtgtcctcggctccgttttccccgtgatccatcagttcgcgcgccagcacgtcggacatgtggaggccctcagattccgctttttccatcagtattttcatctgtttaataaattgcggatcaattttcacccattggccgcggatgttgacgagacgtctgttgtttgcgacaagctcattgaattcatcctctgtcagctcaatcccgttcgtggcgaatctccagttgaaatcaagcagagcgttcatgccgacgaaggactcgccccgcggggaggatgacactttcgccttaagcatcatattgctgtcccggacaatctgccaccatgatgggagaagaatctccacacccatatcgacaagcgtctcactcgcttccgataagaagatccaagcctcttcttcagatatcagcgtcgttcctgaatcaaacgaaagccagggaaccgttctgcggaagcggtcctgttcacgcgcgatttttccgctgtatgcctgccacgcttttttcagccctttcagtccgtcgaaaaaggtgatggagccggtttttttctcacgtaaaaacatctcgattttccagtcgtcaccgtcgaaatcaggctcgtttaatcggaggccgacggtaaacggcgtcagatcgtcatgccagccgattccctccagaaaatcctcttcatccaaaaaggagcctttaaacgtatgaacggccggcgaacgggtttcgatccgccgccatttttccagcaggtcatcattgtactgaatgtagtcctgtaccgcggctgagaaccagtctgccgtaaagccttccagcaaaagctcgcggtctttgaagcgcaggaggccattttgccatgcgtcataatccggaagaaaatcgccgtcggcaataaattcgtatatcgtcgaagccgcttcgattaacggttccgtttcctttgtcagctgcacggtgctgaatgaattgaacgagttttttccaagcagctcgacggtcatccaagggctgagcagaacggccggagtgccgatgaagctgacgtcttcaagaaacgttccgtaaaaggtggactcatgccattggaacaaatgagtcttcatctgactgagagtaagcggctgctccttctcatcatggcttgacagcgtaaatgtccaatcttccatttgttctacatgaatgaaaatttccttaagactcgccatcaatcaactttcctttctgcaattcttcttgaagggcgcgcagcctcttgtagcttgcgctcagccggctgatataacgctcccatacctgctgtttttttgcctttttataaagcgtccgcagttttttcagatggcgcgcagcctctttataggcgctgcggtttttttggtcgataaaaaaggccgccgcccggtgataggaggggatgagcgcttccggatcactggcggcaatttccttcaggatgtccttttcaatttcccagacggaaaaaccgacgaggctgtgaatctccacccattccgcgtaccgccgtttttcgtacaggtactggctgtattcggtaaaggtatagggaaggcagccggaagcaaaccgttcaaacagctgatcatcccgtgagtgccgcgcataatccgccaacagcgcaaacagctctccgatgatgtcgcgcatttctttaaacggcttatcaagcttcgtatagttcacggcaagcggttcgatccggccataccatgttttcagccgtttccagtcttttttcgcggtgagttcaccgagccattgaaaagtgtacggcagcgcttcaggagggaagcgggacatatcttcaaagaccgcttcatcatctttttgcaaaaaggccagatgaagccgtccgaaccgcacttccggcgaaaaacggcgcccgctttcctgttcgagaatctcttgttcacgcgcgacccatttcggccggttcaaaagcgcgctccacatttcaccgaatacccggaggcgttcgtattgaaaaagctcttctttcacaagcagtctgcggagcaccgggggcgtccggtctaaaaaaggatcgagtgaaaaagacaaggcgtacgttttcagtctgtcaatggaggaataaatcgtatccatcagctgttccacgtatggattaatgctgtaataatctttttcggcatccaatctgcctgactcaatcaaagtgaacatgtgaagccagacggcaagcgccgaatgaatctgatataagcttttaagctcgggttttttcggggcgtgttttttgagcgctgacagatagccgtaataaaggccctgcatcgtctggcttccggccggcgtccgcgcctcccacagcgagaattccgaatcaaaaaaagcgagccagcttgacagcgactcttcattcggcagcactttttcctgaaactgccggcggacaagctccctgctttcctcaagcttttctctttccagccaatgttcggtaaaggtaccgacccgctcgaattgggcatatacgtaaagaaaaacggcgagcacgtggcggcagatcgcctcagacgggcatgcgcagccgcttttcaccatgaaaaataagttcagcgtgacccttacaggcacaacatcctgcacatatgcggaaatctctgtcggggtttgaacctgtatacgatagacggaatcctgccgatataaaatgagtgctttcttcatcagctgaacattgtcttcattgtaaggaagaagttctttaagctgttcagccgctgcgagcacatcttctttagcaatcatatcctgaagcatgattatcgctcctaacgagtcacaaaataaaaagattccaattcctctattatatcgcaacacatggcccggaaaaagtttttcctaaaaaaggacataaaaacccgaatgtgtcgaatgatgtattagagattgcaaaacagcacccgacagcatataataatcttgttttcaatttaatggaagccgaaaggaaacgaatgatgaagaaaacgaagttagatcaagaggagtttctgaagattttaatgcatgcgcacgacatcggtgagcagtcctctgagatgaccacaaaagaaatgcttgagaatttgatttcttatattaaaaatggatatgcaacataaaatcccgcagcctcctggccgcgggattttttaatcttcctgtgacaccagtatttaaagcgcttacaaatataatacagattgaagtgattgtctatttttgtcgaattttgtcatttgaaaaggttagaaatgacagtttaaagctgtataatcgtaattggaaaagatcattggagggaatgggaatacacggaaagtgatatggaggttatatgggagaatctgcaagcataaaggaaatattcgcaatactgagaaagcgtctgctgtttatacttattattaccgcggcggcatcttccgcaggcggtctcatcagtttcttcgctcttacgccggtctatgaaaactcaactcaaattttggtcagccaatccaaaaacaatcaaaaagaagtccaattcaatgacgttcaaaccaacctccaattaatcaacacgtataatgtcatcatcaaaagcccggtcatcctcgatgaggtgattaaacagctgcatctgtccatgacttcgaaagagctggaatcgaaaatcacggtatccagcgagcaggattcacaagtcgtgacgattgccgttcgggatacggatgctaagcgggcggccgttatggcaaatgcggttgcatccgtttttcaggacaagatcaccgccatcatgaacgtggataatgtcagcatcctttcaaaggccgaagtgtcggacagccagtcaccggcagagcctaaccgtaagctgaacatcgcgattgcgtttgccgccggacttttgggcggaatcggtctcgcctttttgctggaacatctggataatacgatcaaatcggaagaacagctggaagcgctgctcggcatcccgatcctgggaacggttacttcaatcagtactaaagacagcgttgccaaaagcttgaggatggcggaaaccaaacaagcgggaggcggacatgttgacgcgtaaaaaagacaaacccggaaaacgaagcgtgattgcgatgtctgagccgaaatccatcaactcagaacaatatcgcacgattcgcacaaacattgaattttcttccgttgatacggaggtgaagtcccttttgatcacatccgccggtccggaagaaggaaaatcgacaaccgcggccaaccttgccgtcgtatttgcacagcaggggaaaaaagtgcttttaattgatgcggatctgcgcaaaccgacggttcatttcaccttcaaattggataacggaaccggattaacgtcgctgctgttaaaacagatgccgtttcagaatgccgtcctgccggctgatgaagcaaacttggatattttaacgagcgggccgagcccgcccaatccggcggagcttttatcgacgggtgcgatgaaagatcttctgtcagaagcagccgcagtttatgataaggtgattttggatacgcctcccgttttggccgtagccgatacgaaaatattaggcagctacactgacggggccattatggtgatctcaagcgggaaaacggacaaagaaaaagcggccaaggcgaaagaagcgctcgattactgcccgtgcaagctccttggggccgttatgaacgggaagaaacaaacgaaacattcggactacgcctattacggacaataatgtcacaatgggcgcggtccattctttttaaggagggattgaaatatgatagatatccattgtcacatccttccttccatagacgacggcgcggcggatgatacagaaagcctgaagatggcgagagaagcggtcagacaggggattgatacgatcatcgcgacgccgcatcatgtgaaataccgctatgacacggatcggcatacggtcaacgaagcggtcagcctgttaaacaaacgtttgaataaggaaggcattccgctgactgttctgccaggccaggagatcagaatagacggagatctgctggcaggtcttcaaagcggctcgcttgccccgctccataatacaaagtatgtgctggcggaatttccggcggatcatgtcccggcctatgctgaaaggctgttttatgaactgcagctgaacggatatgtccccgtcatcgcccatccggagcggaacagggaaattcgcgaaaatccttccgtcctttacagtcttgtgaagaaaggggcggccgcccaagtgacggccggctgcattgccggagcattcgggcggaaagcgaaatccttttcgctgcagctgatggaagcgaatttgatccactttctcgcatctgacgcccataatctcggaccgagaaatttttattatcaggaggcgatcagcgttctgaaaaaagaagcaggggcggagctgatttacatgctcacggaaaatgcggcgcttctcgctgaaaacaaagccgtttataaggaacctccgctgcctgtggcccgccgtaagcgctggggtcttttttaatcgtcgtctccatcccgtttaaatgaagcgtaagcggctgttttgcaagatgattcttttatgcttatgctattatcagcggccggcgccgttttttcctatcatgacctcaggctcccggcattccgccggtgccgggatcatatgataatagcggtaagctgcccagcagcaatttctaaacggttgggggaacacgatgaaaataacagtgatcggaacaggctacgtcggtcttgtgacaggagtgtctctttcagaaatcggccatgacgtaacatgcatagatattgacgaacgtaaggttgagcagatgagaaagggattgtcccctatctttgaaccgggccttgaagatatgatgaaacgaaatatcggccggcatcggctggcatttgaaacgagctacgaaaaagggcttgcggaagcggacgttatttttatagcggtcggaacgccgcaaaaagaagacgggcacgcaaaccttacttatattgaaaatgtcgccgaacagattgccgaacatatttctaaagatgcgatcgtcgtgacaaaaagcacggttcccgtaggaacgaatgacagaatcagcgaagttattcattcacggctgagagcggacgtgaacatttcaatcgcttcgaatccggaatttctccgtgaaggttcggcgattcacgatacctttcacggcgaccgcatcgtgatcggggctgaagaccggcagacgcgggaaacgcttgaccgggttttcgcgccgcttgcgattccggtatatcatacggacatcagaagcgctgagatgatcaaatatgcgtcaaacgcatttttagcggcaaaaatcagttttattaatgaaatttctcatatatgtgaaaaagtcggtgcggatgtggaatcagtcgcacacggaatgggattggataaacggatcggcaatcaattcttaagagccggcatcggttacggcggttcctgttttccgaaggatacaaacgccctcgtgcagatcgcgggacatgtggagcatgattttgaattgctgaagtccgtcattaaagtcaacaataaccagcagtccatgctggttgataaagtgctgaacaggctgggcggtgtgacggggaaaaccatcgcgttattagggctgtcttttaagccgaatacagatgatatgcgggatgccccgtccattgtcattgcggatcgtctggcggctcttgacgcccggatgacagcgtacgatccgatcgcgtcattccgggcttccgggctgcttccgtctgcggtttcctatcgggagtccatagaagaagccgtcaggggagcggatgccgtcctgattctgacagattgggaacaaattaaacacttcccgcttgaagcgtacaaagagctgatggaaaccccggttattttcgacgggagaaactgccactcgcttgaggaagcggaacaggcgggcgtggaatatatctcaatcggaagaagagccgtcgtgcctcagactgattctgtcacttgaaaggccggcggtccgcgccggccttttatcatacaatcattagagacgaaggagatattaatcgtggaaaacacatggaaattgccgaagcaaatggaatcatcccgcggtctgctggaaacgtcagcacggccctttatcaaactgcacgtcaaaaaagctgaaacgggactgtatgacaataaaattgccggagacccctattttccgaaacatgaaccataccctgaagatgaaagcggcaggccgatgaagcttctcgcccaaatcaattttgcggatatgcccggactacctgattttccggacaccggcattcttcagttttacatatcggtcagtgatgacgtatacggtttgaattttgacgacgggtgcgcgcaaacgggtttctgcgtcaaatattttgagcacgtgacagatcgggaagaggagctcatggatgatttttctttcgttcaggttgaagaggagtacgattttccgattcaatccgaagcgctgatcacccctgagctgtctgctgaatgggcgctcccgtctgattttcaattcaggcaatatgccgggatggatgccttcgactatttcgagcagtttgacgatgaggtgtatgacgaatatacggtgaacgcattcggccataaaatcggcggctatgcgtccttcacccaggaagatccgcggtcttattcccatcaaaaccatacgattctgctcttgcaaattgattcagatgatgacattgattcgatgtggggagatgtgggaatcgccaatttctttatcagaccggaagatttgaagaaaaaagatttctcaaacgttttgtacaactgggactgcagttaacgacattattagaatcatgatacaaggcaaaggagacggttattcactgtctcttttttttagggaatttatcatggatacatagaggagatcaatgaatggatatgccgtttgtgtgagtcttttggcgttaatgatgagcatctcggctgctgaaaataagtcatttaacctatttaagctgctttctgtctattttaaaatataatatatggaaatatagtatggaaaagtctgtgctttttgtacgactttttgcgtaagacgaggtgaaaacagatgagccattcaagcacattaagccatattaacagcaccatcagccataaactgggcgagatcgaacaccaaattgataaattaaaagaagcgaaaagagagatagaatctctgcaggaagagggcgtgtctgaaatcagggacatcctcaggccgcacctggatcatcattggaccggcacttttgctgaagaatttgatgaccggcgcgatcaggcccatacagaagcatacagaatcgtcacagacaaatacgacggttatatttacagaatcggcttaaagatgacacagcttgaaattgaaaaaggagggctccttgccgccagaagcatcgcgagagaggcagagcacctgctgacgctgggagaagaagcccttgacacggtcggagaaaaaatacaatcaatcaaaaaaagctggagttggttttaatggcagaaataaaactcaaatacggagccgtcatgaagcagcttgaatccgtcagcagcgctttggaggccgtttctatcgggaacgccggtacaaacggaaaaaacaagctcgactatacctccaaataccaatcccgcgaggcaaagcttgtatcgatgatcagcgaatacaagcaggccgttcataagaacatagcggacgttaaagacaacgtagattctttgaaggaacaggacgaggcgatcgctgtaaaataacgaaagaaaggacttgccgatgagcaaagtgtttgaatcacaatcgttaacggacgaagcagataagagaaagaaacaatacgaagcccttgaagaacagctgcgtgcgctcaaacaagcctttcaaggcgtggccgatctgggtgatgctttgaaagggaaaggcgcagacaatataaaggatttctttcagggacaagcggaaatcgccgacagctggctgacgcttgtctctgctcaaattgcgtttttaaatggcatttcaggtgacattaaagatcaagagctcagtgattcatatgcggagacttcatttttagagcatgagctgcccaatgcggatttgagagcttcagagattgtctccgctcataaagcagaaatcgattcgattttgtctggcatcagtgatattattcatctcgatacatatacgctggatgattacgcagataaaatgggtgatgcccagaaaaccagacgcgacacgatcacggcagtcgatacgcttgatgaatccctgaccgctgaatatcaaaacttagaatctctggacaacgcagtgctcagcaaatattcccttctcatgcaggccaccagcaacgggaaaagcgcctcccctatgtactatgacaaaaaagccttccacagcaatgaaatctacaaaagcgtcatggcgacagaaaaacagggcacggactatattgacgcaaaagcccagcaggccgaagcaagacggcttcaggaaaaggctgaagaagaagccaataaaccatggtacgaaaaaacatgggacggcatctgcaactttaccggcgaagtcaccggctattatgattataaaagagcagccgaaggtgttgatccggtgaccggcgaaaaactctccaccgcagaacgcgtcacagcaggagcgatggccgccgccggattcataccggtcgtcggctgggcgggccgcgctttcaaaggcggaaaagccatttacaaaaccggaaaaaccgtcattgccgcagaacatgctttagatgcctataaaaccggaaaatccttagacattctcaaaatgacagaaatgggcgcatacggcctcgtcgcctcaaacggattcacagaagccgtcacaggacgggatatgttcggaaacaaagtgtctgaggaaaaacggaagcaaggggcgctggaagctgcgctgagtttggttggagccggtgcattggcgaagcatgtaaacaaaggcataccgcttgcaacccattcaaaagttcaaaaagctaacaagacactagaaaaagttaaacaattcaaagtcccgacaaacgtccgcgtgtacgcagaacgcccagtaacagcgaacggctttacgtacggattcccaacagtccgtgtcgatgtggaaaagacggctgttaaagaacttgggattgtgaagatggcgagtagccagtcaaaaaaaccaaaatggttggaaaaacctgaggggatgactcaaaatgattatgttgctcataatggtactaactacagtaaaaagaaacggactgaagaatacaatgctgcgctagctgataaagagaagatagttggagacaattcaaatggatatcgtttaaaagaaccaactaactggatggaagaaagaggtatgatacaaataaaagaaagattaaaaagaaaatcttggtcagatagagatgggtttaattggcaatgggattcccagcatggtaaattagaaaagtggaaccgcagaagaacagagcatttaggagagtttgatcctgtaactggtaagcagacgaaaaaaggcgagccttcaagaagatgggatggttaaaactatggaacatggaatcagatttattaatgaataccctgaaatcggtgaattgcttcatcgtctatttgtgaatagggaattagacgaatggtacaagagcaaatgcgcagagaaaataaaagtacctgatgaatttaatcaaataaaaggtttgaaaaaaattgaagttagagatttaaacaatccttcaggagaaattgatatccatttgcaagatctttctggggaaaatggttttcatttagaacagcaaatcaatatgaaagtatctaaattggttcctgtttatgtattagattatagttattccctaagacacgatttaatagatggcgcttatgacattgtaggaaccgctgaatctttagaattcattcagggaacgaactatattaataaaataatgcaagagaaagggtttatcgaactcagttatttgtatgattactacgatactgtgtatgagtggagtgaattgccacatatacagcctttcaacaggagattaacattaggagatgccttgtttactgatgtattagaattgctatagttaagagcttgccttgttgttatcggcaagtttttttataataatttaacaatgtggagtacaaggagaagcagttatggatagagaccatatttctcaattgctgccattaaaaatctgtaatggctggtctgtagtactgaacaatttaagttcagaaaaaagaatgcaagaaaaatatgaattactaaaactacaaaatgaaaaacgtaatgctgttattaaggtaatatttgaaaatgattaataccatgtcatagtagcgggcttaaaaacagataagatttataaagaagactcttttaatgaaatagaacaattattggaagagttggaatatcaaatctggactgtgggaagtggggttttagagggtttgcagcacctaagccaacatgttcccaatttcttaaggcttaagataccagcggggtggactgttgattatattccattaaaagatactgaccctaaaactctagaggaaaatgatgatgcttggttatttgactttaatcaagatctcctgcagtttctcataaaactaaaaatttgctgcttgtagggtggtacccagaaggggatccaaccggcagttatggcattgaactgataaaaaacaaagattgggaaaatcctttagaagatattatgtgtactgaacttaaagaattacttaaacaattggatcttatttttatgaaagaaatgaaaaatgaattttaataaaaagcagattatactatctgcttttttcaatgaagcatatggagtcttcgctagatcgaaacacaggacgattgagcgcgaagactattttaagagaggaaaacaagtgaaatgaaaatacatcaaattcacgattttgaacaaaaagatgaatcggattttattcgaactcaacaatctcttatacataaaatcaacctatcccccgtcatccatccagactccgtcaacaccagcgcaggcgtcgacctcgcttattgggagcaggacggggaaccgtacggggtgtgcagtatcatcgtgattgacgctgatacaacagaagtgattgaaaaagtgcacagcatggggaaaatcagcgtgccgtatgtgtccggttttcttgcgtttcgcgagctgccgctgatcatcgaagcggccaaaaagctggagacggagccggatgtgtttttgtttgatggcaacgggtatctgcattacaatcatatgggcgttgccacccatgcggctttttttctggggaagccgacgattgggattgcgaaaacctatctcaaaatcaaaggctgcgattttgagatgcctgaaaatgaagtaggcgcctacaccgatattctcattgacggcgaggtatatggctgggcgcttcggacacggcgggacgtgaagcctatcttcttgtcttgcggacataacattgatttagaaagcagctatcagatcacaatgaaaatgatcaatcgagaaagcaggctgccgatccctgtccgtctggctgaccttgaaacgcatgttttgcgaacgttttatcggaaaaatcacatgaaacacttggagctctaagccaccaagtgttttttttgtatgcctggtgtctgctttaaaaaaccttgtcgtccttgcagcaggtttttatttgaatgtttttcgcgtcaaatcgataaatgcctttaatggcgcagacatccacttgtccttatgccatgctagttgagtaaaaacggggcattcattctgccagttgagttctttcatccgtccttcggcaatatcgtcttttactgtcatttcaggcaatagtccgattccgagtccggccatcacgcattgtttgatggcttctatgctgacgaattctaatttattagggtagactccggcgtcatgtaaagtgttctcaaagagcgtgcgatatgaacagccgtcctctgtcagcagaagggtttcattttgaagatccttcaatgctgctggtgagtctgctggaaaaggatggtcattggcggctaccattttgatttcatcctgaatcagagattcaacgtgcagtgcgtcttccgaccgattcacatccaaaatgaaagtgatatcaagctggccctgcaagagctgttctttcgcttgttcgttggaaatatacggtttgaatataagctttacttgaggaaaagcctgtttgaattcttttatgataggcggaaggcggtatgtgcactggctttccgtcgcgccgattttcaaggttccggttgtttctcttgcttgatttgcggccatttttgcttcttctgttaacgcaatgatcttctccgcataggatttgaacgttttgccggcttctgtcaggaaaagccgcttgccgagccgttcaaataaaggagtcccgatttcttcttccagtgatttgatctgagaggtaacgcttgattgtgcatagttaagcatcttggcggttagggtgaagtttacgtgttctgctgcggtaataaaggtgatcagctgcttcaattccatttgatctcgccctttctaaatcggttttatcgattggaataatcgaaataatcatctgtattgattgatgaatccattatatgatgaagaaaatcattcgtaaacaaaggagcagatgcatcatgaacattgcggttattcatggcggaacgaggcctggcggaaatacggatattcttgcggagaaggctgttcaaggattcgatgcggagcacattcatttgcggaaatatcggatccggccaattgaagatctgcgtcacgcccaaggcggctttcgtcctgttcaagatgactacgattctatcattgagctgatattaccgtgtgatattcttgtattcgccaccccaatttattggtttggcatgtcagggacattaaagctgtttattgatcgctggtcacagacgctgagagatccgaggtttcctgattttaaacagcaaatgtcagcgaagcaggcatatgtaacagcagtgggcggagacaaccctaaactaaaagggctgccgctgattcagcaatttgaacatatttttcattttatggggatgtcctttaaaggctatgtgctgggagaaggcaatcgtccgggtgatattcttcatgatcaacaggcgctgtccgctgcgagccgtttattgaaaagaagtgatgcgatatgaagctgctgctggttatctctggtatgttgattcttgcactctttctagcttggaaagcgccgacttctgtttggatacaggctgaaaccaattcacctcaggttcagcaatctgtgagaatggcaggcgcaacgctgcaagtcaagcaaatcatcaagagtgatgcaggcgaagaaacagttgtcatatcaaatggtatttccgggccaaaataaaaaagcacctgtccaggtgcttttctttataaatgaggaatcacaagccctccatacaaaaacgccgcgataatcagaaaggccggatgcatcttgaattttgtcaagacaaggagggaaatccccgcaatcactatcgcttgaacccagccgatcgctttgatgccgtctgcgccgatttgccaggtaagaatgagcatcatgacggcgatgacaggctggacggacagcgtcatacctttgatgacgggggattggcggaagcgctgaatgacgcgcaagaggatgatcaatgcgagcgccgacggtacgacggtggcgatcagcgcaatcaggaatccgggccatccgcctgcgctgtagccgacatacgccgcgattttggttgcgatcgggcccggcaatgcgttcgcaagtgcgagcatatttgagaattgatcgtttgagagccagctgtatctgttgacgacttcttcaaacatcagcggaatcgacgccggtccgcctccatatccgagtacgtttgcgacaagaaacgccataaatacataaatcaagatcatgaggccggcattcctttatcttttgaacgtttctttgtgattttgtcctttaatttaaaatgaaacgcgccgtatgccaagaaaatgataatgacaaagccgggattgatctgtaacgtttgcaggccgataaaagcgatgataaaaaacaggatgcccgtgacccagccgaaacctttaagcgctttttggccaaactcgtacgccatgatgccgagcatgacggcgatcaccggtgttacggcgccaatcatgccggcaacgattgctgagcggcttaagacattgacagccgcaaacaagcccgccatagcgagacatgtaggcagaatatgtgcgagggttgccgcgattgcgcctaacgtgcctttcagcttgaagcccagatacgcagccatttttgtggcaatcggtccgggaagcgcattagcgatcgctaatatttctccgaattcatcatcatctatccatttgtatttattgacggcttcatggcggatgagcgggatcaccgacgggccgcctccgaatccgagaatgcccgttcggaccatcgccgccgtaatgtcccaatagggatgtttcatggctatgtcctccttacagcttcatgcccgttctgcttttataccgtttaatcagcatttggcagtcgacgctgacgacgcctttttgcgtatagagccgttttgtcaaaaactcttccatctcctgatcatttgcgaaaatgccgtgcatatgcagcttgctcggtccggtcatatgataaaggcttgtcaccgccggctccttttcaagctttaatgcggtttcctccaaatactgcggctccacctccacgttaaaaaacacggacacatgacggccgattttcgccgggttgatgacagcggtgaatttttcaatcacaccggcatccagtaaatgctgaatgcggtgctgaaccgccactcgcgacaggttaacccgctttcctaagtctgtataggaaatcctcccttcctcgtgcaaaatcgagagaatctgtttatccgtttcatcaaggacaagattcggaatgctgtactcatgttccaaccggcttcaccttccttcatttggtggatattattgtatcatgaaatgttacggtatgaaggggaaatttttttattgttttcgttacgtaataacttaggattatttcttatcggaaagtaaatagtgtgtgagcttttctttcaggaaggtggataccggtgaagccgctttttatacttaggaaaatttgtaaaggggcttgccatgaatacttcaaccatcggaacgaaacaaatggtcgtcagtccgcattatcttgcttctcaggcggggccggcattctggaaaagggaggaaacgcgtttgacgcggcagtggcggtcagcgcctgcctggcagtcgtgtatccgcatatgacgggtcttggcggggattcattttggctcacttaccataaagaaacgggacgaatcaaagcttataacgggagcggccgttcagggaagcatgtgacgagagacttgtatcggggcagagaagcgatccctctgcgcgggccagaaagcgccattaccgttccgggaatggcggacagctgggatgccgtgctttcggcgtacgggcgtctttcgctcgctgaggtgctgaagcctgctcttgattatgcggcaaacggattcccggtgtccgccgaccagtgcgcccacacagaacgcaatctcgctcttttagcctcgatgccttacacctcggccatttttacgagaaacaaaaaagcgcccatgcccggtgaacggtttgtccagaagaatctggcggccagcttggaacagcttgccgagaaaggcagaagcgctttttatgaaggagatctcgctcaaagcatcacatcctttctgcaaaacaacggcagccgtctgacacttgatgactttaaagcccaccgcggcgagtggacgaacccggtatcctctgattaccgcggataccgcatctatcaggctccgccgaattcacagggctttacaggcttaatgacgctcaatatattggaaaactatgatttttctcagattgaacacggctcctttgactattatcatctgctgatcgaggcgctgaagaagagttttcagcaccggaatgaagtgctgactgatccggcattttctcatattccgctggatcggctgcttgataaacggtatgcaaagcagctggcggaagaaatcggtgacacggctgcgccggcgctaagccgtccggtcggaagcgacactgcttatgccgccgtcagagatgcggaaggaaatgccgtttcctttatacagagcctttattttgaattcgggtcagccgttacggcgggggagacgggcattctgctgcaaaaccgcgggtcatttttttcgctggatgaatcccatgtcaatacacttgaacccggcaagcggacgttccacaccctcatgccggcgatggcctgtaaagaaggaaagccgcacatcctgtacggaacccagggaggagaaggccagccgcaaactcagacagcgatgattacgcgcatcattgattacaaaatggacccgcagcaggcgatcaatgagccgcgctgggtctgggggcggacatggggagaggagtatgaagggctgagggttgaaagcagaatcagccctgaaacgagagaagccttaaggcagagcggccaccgcgtcgagaccgttggtgattttgacgggcttatgggccatgcggcagcgatcgtcattgatgaagaaggctttctccaaggcggggccgacccgcgcggcgacggagcggccgcaggagtatagagcatgatacgctaactgatgaaaaaaataagcacgccaagagcggcagaaagacctgcgtaaaacgaatcgtacacatattgcttttcctcccgccggtgccgccattccattaagccgctgcagcaaaatagcatgaaaacaactcccgcaaatacgtacatttcattgaacaaagtcaccgctgcgatgcccgtaataagcagtgtgatttcgattaatcgatgtgtgccgtttatcggcttctgctttttaacagcctttggaaaatgaagaactttgacggcaaatacttgaaacataaggctgagcaaaataaatacggctgaaaaaatcagtaactgaatgaaatccatcgtctcctcctaaaaatgtcactcgtttcatatgggtgagggccttgtaagtttcagcattctataagacattaggctgagtttaatggtaaaagactcaaaaaagacccctttcgaaaggggtctttttgactagtttcttctattataatggttcctgcttcaggtcgggcggacaagcgtatatgtcttcccgagtctgacgtattcattccccgcgagccttgccgcaggcttcagctcatctgtccgtatgtagcctttatcggcgtcatatacttggtcattcaaatgaaaacaaacgactctgccgatgatgaggtctgtcgtcgtttctccgctgtcattttgaaacggaagatggcgttcgagtatacattcaaacctgacttttgcttcttttataccgggaacgctgatgcaggcgctgtctgtcacagaaaggtctgtcatgccaagttcactgacatcaggatcaagccttgccgccgttttgttaatgtcttcaataatggactcatcactgacgtgcaccacgaattcccgatgagcgattgcgtttctcgcggtgtctttctgccgtccgtccgcgcggctgacagagatggccagaagcggcggttctgcggagacaacgttatagaaactgaagggcgccgcgtttacggcgccgttgatggatgaccgcgtcgtgacaaatgcgatcggccggggaacgactgtgcccgaaagcaatttgtaggtgtcttttgcgttcagttcgtctgctcgtaagatatgcatgatttcggccgcctttctttatcgtatgacctgattatacagaaagaaaattcggaaacacaacaaaagaaaaccggctgcatatcttatcacgtggcatatatctgattgaggaaaaaggcttccgtttagccggcagcctatttacaaatggcgttacttgtagtttttctttacaacccagatgttcccgtctttccagtactctgttttgctgcagtaatcgtcttttttgcaagggtcttttttatgaggacggtaaggttttttctgcgtgcgttttttcttgcggcggcatgattttttgtggctgcgagattttttgtgagaacgggattttttatgactgcgagattttttgtgagagcggcgcgattttttatggctgcgagattttttgtgagaacgggattttttatgactgcgagattttttgtgagaacgggattttttatggctgcgagattttttgtgagagcggcacgattttttatggctgcgagattttttgtgagagcggcacgattttttatgactgcgagattttttgtgagaacgggattttttatggctgcgagattttctcttcttactgctttttggttcttggtacaaataatcttccaatccctcggtgcttgcggactttactgcttcttcgatatcagaatgggaatagtggcccattttgaaacctcctcatgatatatgttttaaggatgcgatccttactaccacatagtacgcatgaatgaaaaaagtgtatgtgtgattcgctgagttttatataaatagcacagcctaaattaatacagggagggttactgatgaaagaccaatcaacattgcctctataccagctgtttattcacccgaaagacttaatggagctgaaaaaagacatttgggatgatgatccggtgcccgcggtgctgagagtgaatcaaaaacggcttgacattgatctggcgtaccgcggctctcatataagagattttaagaaaaaatcgtatcacatcgctttttattcgccgaaaacatttcgcagggcgaaagagatacatttaaacgctgaatacaaagatccgtcgatgatgcggaataagctgtctctcgatttcttcgcggagcttgggacgctgtcaccaaaggcgaatttcgtaaccctgcaaatcaatggcagacatgagggggtgtatcttgagctggagtcagtggatgaatattttctggcgaaacggaatttggcggacggggctgttttttacgcggttgatgacgacgccaatttctcccttgtcagtgatctggagcgggatacgaaaacatcgctcgaacttggttatgaaaagaaaacgggaacgaaagaagacgatttatacttgcaggacatgatctataaaattaataccgttccgaagtcagagttcaagggggagatcgtcaaacacttggacgccgataagtatttgcggtggcttgcgggcatcgtgtttacctcaaactacgatggatttgttcataattacgctttgtaccggaatcatgaaacgggactttttgaagtcattccgtgggattacgatgcgacgtggggaagagacattcacggtgatcggatggaggccgattatgtcagaatacaagggtttaataccttgactgcaaggcttctggatgaaccgtatttccgcaaagcgtacaaacagcttttggaagaaacgcttcagacccggtttaccattgaacatatgaagccgaaggtcatgtcactgtatgagcagatcaggccgcatgtcgcaaaggatccttataagaaagaggagattgattgctttgaccgggagcctgatgtgatttgcgaatacattaaggagcggtccgccttcatcagcagtgagttagagcggtggaatatctgatttggaaatgaagaaagattttttacaaataggctggtgaatcagttcccgaaaataatcgtgatacgtatatatgcattatgctttttacattatgagaaaaatgactaggaggacaatagatgaaacgcaatacgaagcggcatcggtctgatgacaactttttgcatgcgatggaaggaaaagtaattactgtctaccggggaggcccggagtccaagacagggagattagcagacattcaatcggattatatcgctcttcaagttgataataaaatcgtttattatcaatggaaacacgtgaaaagtgtgacggaaaatacgagtgaaaccgtatcgccggccgaagcggcagaatgtgaaaaagctgatgattttcaagatctgatcagccggatgaccaatcgcacggtgcaattgaatcagggaggtccggaatcgaaaagaggaaagcttcacgaaacaggggatgattttctcgtgctggaaacagaagatgacggaatcgtatattttaacgccgatcatgtcaaaagcatcagcgcggaacaagaagaggacggccaggaggaggagcgcccggaatttgaaatggctgatgattttcacggcatatttaaacgcctgatccacaaatgggtatccatcaaccgcggaggtcctgaagccgttgaaggtatacttgtggataattccgacggccactacactcttgtgaaagataaagaagtgctgcggatctatccttttcatatcaagagcatcagcgaaggggcaaaaggagcagccaaaaaagaggagaataaagacgacgagaataaaggcgggaaagagagcgccgaagaagaaaagtcacatgaagaagaatctcgcgaagagcagcgtacttcctctaaaaagtcgaaaagatcgtcaagatccgttcgatcctcaaaacgggaggaagagaactcttatagctacgccactgtattaaggacaatagattataggtggaaacacggccgtaaatgattggaaagattgtccgtaaacgcgggagaggggggaatgaaatggctggattaagcagatttcttgataaacaagtcgatattgagatatcggggaatacgacattttcaggaactcttttggatatcggtcaggatatcattgtgattcatgacggccggacgtttctttatattccgctgctgcatcttcagaggatgacattgacgctcccggacgaagagaataaagaaccgtacgcaagaaaaaaaagtccgcatcccgaaaaacaggaacattccttttcttaccggaataccctccagcatataaaaggcagatttacagaaattttcgttacgggagaccgttccattcatgggtatgtgacaagtgttttaaatgattattttgttttcttctctccggtttataagactcttttcatctcgatgcatcatttgaaatggctgacaccctattccgatgagcagacgccgtatacattaaacagttcagagctgccggttgttcccgctaatgtgccccttgtccggaattttgaggagcaattaaaaagatatgtcgggaagctgattattctggatttaggagatataccgaataaagtggggctgttacaggacgtctcagataatattcttgaattgaccaatgcagacggggatactgtcttttggaaattgaatcatttaaaaaccatgcacctgccataaatgataaaactgcctctcttatacagcaggcagttttttttcatagctaaaggtaaatccagctgatccaaacatataaaacggtaatggtaaacacgacggtgagagggacaacgacaatggtcgttttgatatattctgaccaagaaactttttcgccgtgctgtctgatgatatgcatccagatcagtgtggctaatgtcccgatcggcagaagcaatgatccgatatcactgccgataatattagccagataaatgatttttacggttaatgggtcgatggacatttcagttaatgtcaaagtgctgatcattaaggcgggatggttattgaacaaattagagaggacggatgtagcaatgcccataatagatgcagcgtgggcaatgctttgtgagacataaggctcaatagactgaacaagcaatgccgtcagtccgatattatgcagtccgtaaatgataatgtacatcgtgaaggcaaaaataaagatatgccaaggcgctttccttaataagtccgccggtccgatttttaaataaaaccatctccagcaaagcaggatgactgaactgatgacagccacgagcgaaacggatatgccgttgtaagaagctgcaaacagactgatccggacaaacaatacaaataccaaaacacaaaacatgatgttcgtacggctgtttttttgggacaagtctggcggaggctgaagcggatgatatcgtttgtgttccagcgattcaaaatgaaccggaatatcggggagctgtttcggcaaacggcggtagaaaacggcaaacagcagaaaggccataaacaccagtcccagcgtgccggggataaacatcatattggtgtacaaataaaggtccatgcctatcattttgagagaaattaaattgacgatattactgacgccgatcggggtgcttgccgccgtcgcaattaatacgccgcttattaaatacggtgttttctgatgtcttttaagtccgagatattgtaagaccaatagtaaaataggagtggtgattaagacgctgccgtcattattcagaaagagcgtcattgaaaaacagagcaggttggtcagccaaaaaagccggatgcctgatcccttggcgcggtgaagcagtttggccgccgcccagttaaaaaaaccgaagctttccagcgcgatcgccattatcattgtggagataatggttattgatgctccggtgacttttgaccctatatcccccaaatcatgaaaggaaacggttccgcataacaaaacgagaatggcgcccagcgacgccggaacggcttcatttaatcccccgggtctccaaaatataaaaataatggtcacaaagaaagaaatcagggtcaaaatgacggtaatatgtgtaatgtgttctgcctccttttcgatgggtcattgccgccccgttatttttatccctcctgatcagttgtactgtatgtatacgggtacaggtcgtaaggtgtactgagcgtttctaccaatttagtaaaaatccataaaagcacaaaaaaaagaggctgctttcggcggccctcttttttatgcattttccttatccgcctgcaataaagcctggcgcttattcataatatccagaaaatgtttcaggatcggattttgattatccttgcggtaggcaatgacccattcggcagtgagctgcgcctgattaatgccgcggtaggcgacttcgagattaaacagctttttagcagaagaaggcacgaaggttacaccgataccggcactaaccaatccgatcaccatttgatactccgtcgcttcctgaacgattttcggtttgaagcccgcctgctcgcagtagtttacaaactccaggtataaagtcggccatgtttctttcgacagtgtgataatcggttcattttttaaatcctgaatgtcgattgtctgtttagcggtaagcgggtgctgcttcggcaaagccagaatgcacgggctgctctgcaccttttccatatgtaacgcggaatgttgtaaaggcggatgaaggatgccgatatcaatgttccccttcagaagttcttcctgctgtctgaaagaagaaatttcacgcagatcaagcttgacggaggggaatttttcgcggaattcccgaatgatcggcggcagaaattcatatgtggccgagccgacaaaaccgacgacaaggcggccgagctctccccgcgccgttctctgcgccatttcaatcgctttgtctatttcttcgatcgcgtttctgctgtgttttaaaaaactttctccggcagctgaaagctctacaacccgtttcgtgcgctttaataaggtcacgccgacttccttctcaagctgtttgatctgctggctgagaggcggctgtgtcatatttaaccgaagcgcagctttgccgaaatgaagttcttcggcaacggcaataaagtattgaagatggcgaagctccatccttatccattcctttctctttgttaattattcgtgaaacatattaatcatacggcgaattgatattggaggtcaatttccaaagagtgtatagtgaataatatcacaaattacttaaaattttatatttaatatgcataataaggagtgagggtgttggcaaaagcaacaaatgaactaaaaacctctgaaaaaaatcggggggcggagcttgttgttgattgcttagtggagcaaggtgtcacacatgtttttggcattccgggtgcaaaaattgatgcagtatttgatgcgttaaaagataaaggacctgaactggttttatgccgtcacgaacagaacgctgcatttatggctgcggctgtcggaagactgactggaaaaccaggcgtttgtctcgttacttcaggcccgggggcatccaacttggcgaccggcttgttaacggctaatacagaaggtgatccggtagtggcgctggcgggtaacgtaattcgcgcagaccggttaaaacggacacaccaatcattggacaatgcggcgctatttcagccgattacaaaatacagtgtagaagtacaggaaacagggaatataccagaagcggtaacaaacgccttcagggcagcgtcagcaggtcaggcaggcgcggcttttgtgagctttccgcaggatgttgtgaatgaaatcacaaatgtgaaaaacgtacgcagcgtgccggcgccgaaacaaggccctgcaccggaagaggcggtcagcgcggctatcgcgaaaatccagacggcgaaacttcccgttctgttagtcggtatgaaaggcggaagaccggaagcggtaaaacaaatccgcaaactgcttgccaaaacaaaactgcctttcgtagaaacgtaccaaggggccggcacattgtccagagagctggaagaccaatatttcggccggatcggactgttccgcaaccagccgggcgatcttctgcttgaacaggcggatgtcgtattaacgatcggttatgatccgattgaatacgatccgaagttctggaacgtaaacggtgaccgtgctattatccatcttgacgaaatccaggccgatatcgatcatgcctatcagccggaattagaattattaggcgatatccccgctacggttaaacaaattgaacacgacgctgtgacatttgatatgggcagccgtgaaaaagaagtgctgagcgagttaaaacagatgctcacagacagcgagaaggcgccaagcgatcataaatccgacagagtgcatcctctgcaaatcgtccaagaactgcgcaatgcaattgatgacgacgtaaccgtcacttgcgatatcggttctcacgcgatctggatgtcccgctacttccgcgcttatgagccgctgaaactgttgatcagcaacggcatgcagacattgggcgtagcgcttccttgggcgattgccgccacattggtgaatccgggtgaaaaagtcgtatccgtttcaggagacggaggattcctgttctctgcaatggaattggaaacggcagtccgcttaaaagcgccgatcgttcaccttgtatggaatgacagcacatatgatatggtcgcattccagcaaatgaaaaaatataaccgtacatcatgcgtagatttcggaaacattgacatcgtaaaatatgcagaaagcttcggcgccaccggcttgcgcgttgagtcaccggaacagctggcagacgtgctgcaaaaaggcttgaacacagaaggccctgtcatcattgacattcctgtcgattacagtgacaatgtccatttatcaagcgacatgcttccgaagcaattcaaagaaaaaatgaaagcaaaagctctctagcactctgcgcaccatgacctgttttctaaaacagcccaatttaaaaggagtgaagggaatatgaaaaacgcaagcgacatccatatgatgagccgcggagaaaaaggctcacctgaggatcaaatctatcaagtatccaccatgacatctctgctggacggagtgtatgacggagattttgatatggctgacattccgaagttcggtgatttcgggatcggcacgttcaataaactggacggcgaattaatcggatttgacggcgaattttaccgtctgcgcggcgacggaacggctacgcctgttaaaggcggagacctgtcaccattctgctcattcacatttttcacgccggacatgacgcatacgatcgacggcgaaatgacccgtgaagaattcgagcaggaaatcgccagccttctgcctagtaaaaacttattttatgcgatccgtttagacggcgtatttaaaaaggtgcagacaagaacggtagaacgccaggagaaaccgtacgttccgatgattgaagcggtgaaaacacagcctgtgttcaactttgacgacattcagggtacaatcgccggcttctggacgccgggttacgcaaacggcatcgctgtttccggatatcacctgcacttcattgatgaaggacgcaattccgggggacacgtgtttgactatgtcattaaagattgtaaagtgaccatttctcaaaaaatgaatatgaacctcaagcttccgaatacggcggactttttcaacgcaaatttagataatccgaattttgcgaaggatattgaaacaaccgaaggaagcccggaataaaataaaaaagaaagcctcatttttctcgggggctttctttttatttggctgaaccggcaaagattaggtaaaatacagtcaaaagggaaaggtgtggtagctgtgaaagtattggtattagcggttcatcctgacatggacaactcagcggtcaataaggcgtggacagaagaattaaaaaatcatgatgacatcacggttcgtgagctttataaagaatatccggacgggaaaatagatggggaaaaggaacggcagctgtgtgaacagtatgaccggatcgtatttcaattcccgctgtactggtacagtgcgcctccgcttttaaaaacatggatggatcatgtgctggcgtatggctgggcttacggttccaaaggaaaggcgctgcacggcaaagaattgctgctggctgtttctgtaggtgccggagaggatgcatatcaggcaggcgggtccaaccatttttcactgagcgagctcttaaggccgtttcaggcaatggctaattttacgggaatgacctatttgccggctttcgcgatgtacggggttagcagcgccgatgctgcggctatccgtgacaacgccaaacgcctggcggattacataaagaagccattttagagtcgtatgcattcatcttcatccgacaatatttcctgagaaatatttcgaaccttagacgtttctgactgctcaagaaagaaaaaacggatttcgcgctgaatttgcgaaatccgttttgatattatgtcagtttttgcagatcttttgtgctgatatatcccgttgcgcccccgtaatcgacaagcgcccagccgaaatcaatgccgccgccggctgtctttttccatccgaggaaagaaacgctcgtgtttttggcaagggaagctgtgaccgcttgtttgtctgtatatacttttgtttttgccgtcgtttttacggttgttgcttctttaacaatataatgagtagatacaaatcctgtttttccgtttttataatgtacttttgcccagtcagcgttctggaatgaaacgatctttaagctgtcgcctaaatgaagggtatcagctctcggactggctgctgatgcttttgttctcacgttcaatgcttccgcggaaacgagataagagtcaagcgggtagctgtacagatcgtcaattttgaccgcttcttgcgcgtgtgtctcgggaagaggcgttattccggcagctgaagccgctgatattcccgctgcaagggtcagaatggatgccgctttggctgttttcttcatctgtatctctccttttacttcatcctttcacgttttaccggaagtctaaacatcagccggttatttttgcgtttgaagtttcaatggagcggaaatggtttttttgactttttttcctttgagcacctgctccgccgcttcggccgccagttttccgatcagctccggctgctgggcgaccgtggctgtcagcttcccgcttttaatggaagaaatcgcatctttatttccgtcgaaaccgacgaccaaaatgtgtttgcccgagctgttaatcgcttcgagcgccccgagtgccatttcatcattatgggcgaacacggctttgatatccgggtgtccctgcagcaggttttccatgacggtcaatccttttgtgcggtcaaaatctgccgcttgctttgttacgacatccagctttttgtcggcaatatgatgaaagcccgttccgcgttcccgtgtcgcggatgcgcccggcaccccttgcaattcagccactttggcgccttttccgagctgatcggcgaggtagtcagccgccatttctcctcctttgacattgtcagaggcgacaagcgtttcgactttgccgtgttcggctgaacgatccagcgcaatgacgggaatgccgagggaatttgccgattcgactgctgttgaaatcgctgatgaatcggtcggattgatcagcagcgcatcgactccctgctggatcaaatcttctacgtcatttgactgtttagatgaatcattttgggcatcgacaataatgaccttcatgccccgttttttggcttcctttacaacgccttcttttaatgaaacgaagaacggattgtttaatgtggagacggagagcccgatagtgaattcttttttatgttttgtgtttgacggttttgcccattgcggcggttcaagtgaacaggcggacagcaaaaacagtgataatgccgcgatcgtgatgatggctttcttcataatggtcctcctactatgccgattttttgcggtccagcagcaccgcgattaaaatgacgattcctttgacgacgagctgataaaacgatgatacgccgagaaggttcaagccgttgttcagcgtaccgataatcaaaaccccgatcagcgtaccgatgatgcgccctcgaccgccggacaggctcgttccgccgagaacgaccgctgcgatggcgtccagctcgtatgattctccggccgtcggctgtgcggaatttaagcgtgatgtcagaatcgctcccgccagcgccgataataaacctgtcagagaatagatcatgatcttgatgcggggcactttgattcccgatatcagcgccgctttctcattgccgccgatggcgtatgtccggcggccgaacggtgttttgtgcagaagaacccacagggccgcaaatgcaatcagcatcgtaatggcaggtacggggatgccgagaaaataaccgcgcccgaataattgaaatgcgtaatttgaaccgagccccgtaatcggatttccgtccgtatagacgagggtcagtccgcgaaagacggtcattgtcgccaaagtggcgatgaacggcgccatttttccttttgtgattaataatccgtttatcatgccgagtacggcgccgatcacgcagccgatgatgacggctaagatcgggtcgatgcctgagaccatcatacctgcgaccactgcgctcgataaggcgaggatggctccgacagagagatcaatgcctcccgttaaaatgacaaacgtcattccgaatgcaatcagagcgttaatcgcaacctgccgaagaagattgagaatattgagaggttcaagaaaactcgggtttaaaacggaaacgatcagcacaagaatcagtaagccgagaaacggaccgagtttttgcgtgaaggtatgaatggaaaatcgcttttgttcagttgatgttattggttcagttttcatactgctgccctcccgtggcaagtgtcatgatgtgttcttgtgttgcatctgccgcattgatttctccgctgatgcgcccttcgtggacgacgatgattctgtcactcatgccgagaatttccggcagctcggaagacaccatgatgatggcgactccgcgatcggtcagttcattcattaatgaatagatttcccttttcgcgcctacgtcgacgcctcttgtcggttcatcaaggatgaggactttcgggccgattccgatccatttggcgatgacgactttttgctgatttcctcctgataaatgccgggcggcggtttccggagatgcagtcttaatggtcagacgcttgatgagcagctcaacgaactccgcctcgcgttttcggtcaatgatgcctttcggagagaagctggtcaggttcggcaatgagatattttcacgaatggacgtatccagcagcagcccttcatctttgcggttctccgtaatcaggccgagtcccttgcggatggcatcgtacggaccccgaatgccggtttttcggccggaaatccagacctctccggaatcgagccggtcaattccgaacagcgccctcatgatttctgtccgtccggcacccattaagccggaaacgccgaggatttctccggcgctcacatggaaactgatctgtgaaaatcttcctttttttgaggcgtttttcacttcgagcaccttatcgccgagtgacggcgtgcgggtcggataccgatcggtcagctcccgcccgaccatttttttgaccacttcatcaaaatgagtatctttcatatgcgccgtatcgacagtgaggccgtcccgcataatggtgatccggtcgcaaattgaaaatatctcttccattcggtgagaaatatagacaatggatacgccgtcccgctttaacgccgtcatcacgtcaaacagtttgctgatttcccgttcggtcagcgccgcggtcggttcgtccataataatgacttcggcgtttgtcatcagcgctttggcaatctcaatcatttgctgctggccgacggaacattgtccggcttcccggtcaagaggaagagagactcccagtttttcaagctgtgattttgctagcgctttcattttcttcgtttccaaaacgccgaacgccgtcgtcagctctttgccgataaaaagattttcaagcaccgtcatgtccggccatatattcagttcctgatggataaaggcgattccgtgcttttcggcttcctttggattggagaaattcatatttgttccgtttatcgtaatgtttcccttgtcgagccggtagagcccggtgagcagattcattaacgtcgatttgcccgctccgttttctcccattaaagcgtggatttctcccggcagaagctcaaatgagacgccggatagcacttggtttttgccgaatgctttatgaatgtctgtcatgccgatgtgcatgctggatcccttctttctagaaaatcacacccgcctgcaggatgcagttggcgtatggtgtcatttcacccgtccggatgacggcttttgctttctgtgtgagccgtttgaattccgagtgggacatgtactcgatcgtctgcgctgagaaatggctttctatgaaacttgcattctcaggattttcgtctttgatctcggaggcggccatcaccttttcgacggccatctccccggctaccaggctggtcacatcccgaaaggcgggaatgcccgccgttaaggacaaatcaattttagggacgccgtcagggacggggagacccgcatcggcgatcgcgatgaggtctgtatgcccgagatcggctaatactttggcaatgtggctgtttaacattccgtgttttttcatgacagcagctcctcaacttcttttctgaccggcatcccgccttgggcgccgaagtgctgcacggacagggaggcggcgcggttggcgaacaggagcgcttgctcgatgtcccgtccttccgcgagcgcgacggcaagtgccgcattaaaggtatcgccggcacccgtcgtgtcgaccgcttctgcagggaagccgggaacaagccgttccgcggtgccgtctgagtagcgtacgccttgttttccttcggtaatgaacagtttgccgggatagccggcgagcgcttcttctttcgtccggtcaggaaataaaatggatgcttcatgttcgttcggcgtaagatatgcggcattctcaatcgtcgattgtttcagcgggcgggccggcgcgggattcaggataaccggaatttggtgcgcgcggcagtagctgcacacttcttcaacagtttcttcaggaatctcctgctggatcagcacgatatcaatgccgggaagtttttccagcgcacttttggcataatcgggtgagatgtcatcgtttgcgccttttacgacgacgatgctgttgtctccttctgcgagcacaatatgagccgttccgctttttttatgtgtaaccgtttccatatagtccgtattgacaccgtttgccttcaggttttcaataatcgcttttccgtagctgtcactgccagcttttcctaccatatatacgtttgcgcccagacgggaagcggctacggcctggtttgcgccttttcccccgggcacggtttgaaagtctgtgcccagtacggtttctccggctttcggacgccgttcggatgtgacgaccagatccatagaacagcttccgataacacaaatttcactcatggtgatcatcctttctcgtcgtttgtcttcttatataagtcacgggcagttgaatggccgtctctttcggcggctctttctttatcaattgcagcagcaggtttgccgcttgttttcccatctcatatgcaggctggcggatggttgaaagcggcggaaacaaaagcctgctctgcggaatatcgtcgtatccgatgatctgaatctcctccggaacttttttgccgagccgcagcgcctcatggaggacggcagccgccgcaatatcgttgctggcaatgactccgtcggtttcggggtatgctgcaaacaatttttctgctaaaacggcggcatccttgatagaaaatgaagcggcggagatgacattgaactgcgcgcccgctttatacagcacatcaagtgcgccgttaaaacgttcctgagcggtcggaaggtggcctgggcctttgacaagcgtgatgcttgtgcttttgccgcgaagcatttcctcagccgcccgttttccgcctgcccgcccgtcactgaatacggatggggcgccttcttttgtccggtccagaaatacgaccgggtaaaggctgccgctgtattcgggaaggtcggggtaatgggtggccgccaaaataccggcaacttgattttgtttaaatgtttgcaggtagtcgagttctttttccaattcttcatcgctgttgccgatgatcagccggtatccttcccgctgcagctcgtcttcagcgccgcgggcaagctgcgggaaaaaggggttcgtaatatccggaagcaaaagcccgaccagtctggattctcttttataaagagagcgggcaacttcattcggataataattcagcttctccatggcaagcatgaccttcgttcgtgtatcttcatggacgtagccgttgtcattgaggacacgcgagaccgtggcaacagagacgccggcagcgcctgcgacatctttaatcgttaccaacaaacactcccccttcatttatgtaaccgtttacacaaaaagagtaccacgaatcatttcggttggcaacaaaaaaagagaccggggtctcttttagttcacgatgccgatttgcgagatattcactttgatatcagggattatctcgatggaaggatagacctcacgccaattgagccgcttgccccgctcataataatgggtttgatatttccggccgatgccgaggatatccgagttgtgctcctgaatatggctgatcaccgatctggcctggctgttcaaatttgctgatgcttgtttgttcatttggtcgattgccgtataagaattcagtttgtccttcggatattccaagacgcgtgcattcagctttaaacggattttcacttttatatgctgcggatctgtatctataaatacaatctttcgcgtggcatccgtgatgccgagagaaagataattttcaatatccattttgtatttgtcccacagcttcagattaatattagccgatttattaaattgcccgcttaaaagggtcaggagggtcgaatcctgaccgagcacctcagtcactttccgctgtccgctgaacagggcagaaccctctacctttatcgtctgtccgttaatcgataaataaggaagggcgaaatccttatcagccgtcagcatgcttgaacggatggattgcaaattttccatgctgatatttgattccgcattagcgcttgttaataaattcgttaaatacttgctgacgatcaatttctgccggacgatcagcttcagcacttcaatcgcctcgccgtcttttacaaccgccggatgagcgagaagcggacttttcggatctctgtaaaagacatcgagataaggaaaaagcggtttttccgccattttctcaccgattaataagactctttgcttggacgtgtcaatgcgctggtcgacaagcttatccaattgaaaccgcgcttcacggatggtgtgtccggaagcgctgagcaccgtcgtaatgaatgagccgcccgtttcctgttccgcctgggaggactgaaccttccgataggtaatgccgattttatttttaccgtcatgatcaacatcaaggcttgcggtcagcacgagagaaatatctttcaacaaattttgatcccagcagccggcaagtgtcaggcttgcgcacatgagactgataagaaccgcttttttaatgcgcatggcggacaccctttttgcgtacaaggacaatcaataccataaacaacggaaacaaatacacaaacacaatatcggaaatgcggaaaaactgatccagctgctgtatcgttttatctgtgcttgtggcccaaatagacagaaggaagacgagcagggccagcggataaacaaaccggctgtgatctttttgattgaacagcttggcgatgccggtgcttgccaagtaaaacacgttggccagcgttgaaaagacggtcacgaaccaaaacgtcaaaaagagcagatccgtccgttcgataattctgaatgaaacggtttttaacaggtacagcacaggctccgggatcatttttatttcttcggggctgatggtgacaaagcaagtaagagtgatatacaggtaataaaggataatcaagccgtttgaaatcgtcagtattttgtagcgctggctgacggtgcagttgataaggggcccgatcacaagcgccgcctgaaagccggtaatgctgacaagtgtttgctgcaccccggtaagcatgtcttttgcggttccgtgaaaaatcggcataatgtatgtgatatcggcttttcccagtgtgtataaaagcggcagagagatcagcagcaaaaacggcgttaaaataaagctgaacctcgcgatcgcattcagcggggcttgggcgatatagacagaaccgaggatcagcattaagctgatcacccaattcggagtctgagggagcacccagatatccaataaccgtgtaaatacagaaagaatgagcgtgcagagaaacgcgaaatataaaatatacagcacctgcacccctttgccggcaagtgttccgaacacctcctccagcatttcatacaggttcagcttcggaaaccggtgaaataatatcatatacaggctgaaggtaagctggacgagcaatccggtaagcagaatggaaatccatccgctgcttcccgatttcatcatcagtaaatggggcagcgccaaaatgccgatgctgatctgcgtctgattaatgaaaaacacgccttgaagccggctgatttttttaggcttcatcttttctccacccccgaacatgttttatctgctttgaatcttgcggtctcaaataaaaaggccttcttttaataaaccaggccggcagccggataaatgcatcctttaagtcactgaaatgaaacggcgtcagagatgataaatacggaacgccgagggattcaagcttgcacaggttcatcagaataagtccgaagccgaatgcgatgccgataaaaccgaacgaggatgccagaaacataagcggaaatctgagcgttcgaatggacgtgctcatttcatatgaaggaagcacaaaagaagaaacggccgtaacggccacgacgataatcatcatattagaaatgagtcccgcctgaacgactgcgtcaccgatcacgagaccgccgacaatgccgatcgtctgactgatcggtttcggcagcctgataccggcttcgcggatcagctcaatcgtaatctccataatcatggcctctatcagcggagggaagggaatatcaacaatcgaatttttcatggtgataatcaaatcgttgggaatgacttcaaaatgaaacgcaatcagcgcgatataaaaagcgggcagtgtaatcgcgatcataaaggcgaaaaatctcagcactctcaaaaaactggcggaaatccacctcgtgctgtagtcatccggcgattgaaaaaaggaaaagaacgtgatcggcgcaatcaaggccgacgggctgccatccatcatgatcagcacacagccttccatcacgcatgcttttgctttatccggccgttccgtatgaacgatctgcggaaaaatggaaaacgaattatcttctatcgactcctcgataattccgggcgcaagcacgctgtctatacgcaggtatgacaggcgccgcttcacttcctccacaatctccggattggcgatattctcaacaaagataaccgcaacctttgatttggctctttccccgatatccatataatgaacggagagatggcggtcctgtatgtgaaaccgcagctgatgaatgttcgtttccaaactttccacaaacccgtcatgggcgccgcggacgatactttcagattcgggttccataatggaacgcagcggattctgcccgacggaaaacagcttcgctttccttgatgcatcgctgagaaaaacaacctggcctgccaaaatcccgtcaatgagttttctggtttcatccgtttccgcactgctgacggcattcatcgtttcctcaagcggaccgttctgcagggtgtcgcttaacagaaactcattcagcttctgttcttctatcatttgttcaatataaaagaaagcggtatgacggtcctgcagtttgatccttcgtattttaaaatcaccgcaaacacacatcagctcctgcatttcccgtacagccgattcaaaatcgccggaaatccgcttgttttgtttatccgcagacatcagaccgcctcctttcccggttatttgtagttttcagcgggtattccttttttatgcattttataaaatagaggagtttctcgacgttttaccaagaacttcacaattatggatgaatatttcttgaacgaatataaagatttattaaaattatttcaaaagagtgataaatgtcctgtaaatgctttaaaaggagataggctttccgcatataaaatgtgtatttcttgtaaacactccggacccgtctttttctgtcacgtaccagtcattccgctagttattttggaatgggactgaaagcaggatacgggggaaaaatgaatgactttaagaccttatccttaacaaaacaggcagtctgcacacagcggacatagagtcccgaaacgtatgcgcagtgcggaaaacgctgatataacaggctgtaaaagatggattatcattacatctttttcttccggaacgcgtatagtcccattggtccaaatgaatttatgtgcggaaatgtaaacgcatacatttttcttttaaaaaattgaagtaaggtttaagtcctgcctattcccaaaaaaagcaattcgataataggaagaatagcgtcactaatagagaagtttggctcagtgaaagcgggaagattatgttacataatgccgattgagaattcatagtgaagctatatactgatgaatgaatttatcaatacagaaggagatgtcaaaaatcaatgtggttactcattatagcctgtgctgccgtactaatcatcggaatcattgaaaaaaggcggcatcagaagaatatcgatgctctgccagtacgcgtcaatattaatggtatccgcggaaagtcaaccgtaacgaggctgacgaccggaatactgatggaggcgggctacaaaacagtcggaaaaacgacgggaacagatgcaaggatgatctattgggatacacctgaggagaaaccgatcaaacggaaaccgcagggcccgaatatcggcgagcaaaaagaagtaatgaaggaaaccgtagaacggggcgccaatgccattgtcagtgaatgtatggcagtaaacccggattatcagattatctttcaggaagaactccttcaagccaacatcggcgtcatcgtgaatgtgcttgaagaccatatggatgtcatggggccgacgcttgatgagattgctgaagcttttaccgcgacgataccgtataacggtcaccttgtcattacagacagtgaatacacagacttctttaaagaaaaagccgcagagcggaataccgaggtcattattgcggataactctaaaattacagatgaataccttcgaaaatttgaatatatggtctttcctgataacgcttccctggcgctcggcgttgcccaggctcttgggatagatgaagaaacggcgtttaaaggaatgctgaacgcgccgcctgatcctggcgccatgagaatcctgccgctgctcagcacgaaggagcccggtcatttcgtaaacggctttgccgcaaatgatgcatcttctactttaaatatatggaaacgtgtaaaggaaatcggctacccgacagatgaaccgatcgtcatcatgaactgccgcgccgaccgtgtggacagaacgattcagttcgcaaacgacgtgcttccgtacattaaaacgaaggaactcatactcatcggcgagacgacagaaccgatcgtcagagcttatgaagaaggcaagattcctgccgatacactgcacgatctggaatataaatcaacagacgaaatcatggacgtgctgaaaacaagaatgcaaaaccgtgtcatatatggcgtcggcaatatccacggttcagcggaaccattaattgaaaaaatccaagagtataaggtgaaacagctcgttagctaggaggaaaaggataaatgttcggatcagatttatacatttcacttattttaggcgtgttaatcagtttaattttcgcggaaaaaacaggtatcgtacctgccggtttagttgtgccgggttatttagggctcgtttttaaccagccggtctttattttactcgtactgctggtgagtcttcttacatacgtgatcgtcaaatacggtttatccagatttatgatattgtacggacgcagaaaattcgcagctatgctgataacgggaatctgcttaaaaatcgcccttgattttctttacccgatcgtaccgtttgagatatcagaattccgcggaatcggtatcatcgtaccgggtctgatcgccaataccattcagaaacagggattaacgattactttcgccagcacgctgttcttaagcggcgcaacttttgccattatgtttgcttactacttaatctaatgtaaggtgtgtcaaacgatgaaaaaacaattaagctttcaagaaaaactgctgaagctgaccaaacagcagaaaaagaagaccaatcttcacgtttttatcgcgctgccaatcgtcttttgcctgatgttcgtctgcatcctgacagggaaggcggaaacgccgagtgtgaaaagaaatgccgatgaccttgtatcagcctcatttgtcggagatattatgatgggccggaatgtcgagaaagtgacaaagcataaaggcacggagagtgtcttccgttatgcaaagccattcttcgaatcatccgactatgtgtcagggaactttgaaaacccggttacatataaaaagaactacaaagaagcagaaaaaaatatccaccttcagtcaaacaaagatgccgtaaaagtattgaaggacatgaatttcacagttctcacggcagccaacaaccatgcgatggattacggccctcaaggaatgcgggatacggttgaagagttttcaaagcaaaatcttgaacttgtcggagcaggcctcacgctgaaggaagccgagcagaacatttcttatcaagatgtaaacggaatcaaaatcgcaacactgggtttcactgatgtttccggaaaaggttttgcagctaaacgaaatgcgccgggtgtgcttccggccgatccagagctgtttattccgatgatttctaaagccaaaaagaaagccgatcttgtcattgttcaaacacactggggacaggaatacgataatgatccgaatgacagacagcgccaattggcaagagcaatgtccgatgccggagcggatattatcgtgggacaccatccgcacgtgctggaaccgatcgaaatgtaccacggcaccgttattttctacagcctgggcaacttcgtattcgaccaggggtggacaagaacgagagacacggcgcttgttcaatatcatctccagaaaaacggcacgggacgctttgaagtcacgccgatgaacattcatgaagcaacgcctgcaccggttaaaaaaggcagcatcaatcataaaacgatcgtacgtgaactgacgaaagaatcgaatttcaagtggagcgtcaaggatggaaaattaacgtttgatgtggatcacagcgatatcttaaaaaagaaagcggagtgaaaaacaaatgaaaatcattaaagcgggatggccgtttgccgcgatcattatggtatttatgtttatgtctgcgtttaaatacaatgatcagctcacagatcaggaaaaacaaaaaattgacacggaaatgcaaaaaattcagcaagaggacacagcgggcgcaaaataagcgcatgattccgcttgccggcatattgtttgttccgaatccagtaaagaatgcccatatcgggcattctttttttgtgtgctctcctaaacatttgttaaaagttaccgatgtaaaaactactaaaaatgaggagagtgaatagaaaacatgctcacaagctggaggaagtacatccttgccggccttatgatttgtcttgtggcacctgcagtaacgagaacggaaattgccgaagcggattctcaagtttctgtcctgatcgtttcagacgcgcaaaaacttgtcggaaataaatatgtttacggaggcgaagagcctgaggacggttttgacccgtccggattgatgcattatcttttcagcaggcagaacatccatctgccgagaacggtcagtgatcaatggaaagtcggagccgccgtcaaagaaaatgaccttttaccgggagatcttgtgtttttcaaaaagtcagattcaacacaaaacgcggccgtccatgacggtctgtatatcggaaacggagagatgatacacagttctccgtcagaaggcgtaaccgtcacacgctttcaaaaaagcagttattggatgaatttatatcttggcgcaaagcggatgacaaaagatccggaactggctgatgatccgatcgttcaggaggcagcccgttacctcgacattccgtatgtattcggcggaagcacgcctgaggcgggattcgactgttcggggctggtccaatatgtttttgaaaacaagcttcacatttacctgccgagatctgcggaacagcagtggctggtcggtgagaaaatcaaactgagcgacataaagcccggggacgtgatttatttcagcgatacgtataaaaaaggaatttcccatgcgggcatttatgcgggagagggaaggttcatccaagcaagccgctccgaaaaagtcaccatttcttacttggcggaagattattggaaaaaacatttcacaggggtgcgccgattcagcaatttagccatttctaaagacaatcccgttgtgtccacagcggccgatcatatcggaatttcttatctgaaaggcggcgcttcaccggaaaccggctttgatacggcgggatttgttcaatacatctatcaaaaagcgaaaggaatcagcctgccgcgttatgccgacaagcagatgcaggcgggcgttccggtcgataaacaagatctgaagcccggcgatctggtcttctttaaagcggaaagcctgaatccggccatttatatcgggaacggacaagtgattcatgtcaccgtgtccgcaggtgttaccataacaaatatgaacacaagcgcttattggaaggacaaatatgcgggcggcatccggcttccgtaaaaaaagacgtcagagagtgtctctgacgtctttttcttttaccgtttcggcgctctgtatccggccgctatcgcatcctctacagaacagaacatttccgcgggatctgtcgtccggtcgtagtacgtacttcccggcgtgtgataaatgccgtaccggctgcctttaatgtcgcatccctgtgaggtgccggctgctttcgtttcggcatgtcctccggaggaaggggcgttgttttgcgccgtttccgcgttttcggatgtttttgtttctgctttctgccgctttaaagttttattttctgactgaagcgtttcagcggtcttttcgagcttcttttgtgaattttttaatttctcattgtcttgtttgagtgatttgtttgtttttttcagctcgcttatctcttggctgagtttgctgagtttttcttcattgccggcttcagcttcggatttctccttttcggctgcggcactgatgctttcatattttttctcaagcgcctggtgttccttcgtcaatttttgataagccgtatcaagggtgctgtatttctcctctgccttcacggccgaggcgtccggctctgcgagggatgcaccggtcagaagcaggataaatccgccgatgagaagaggccaaaacagcttttttgaaaaatgtttttctttttttgccgctttgcatatgagatgaaaaattccgtatccgactgcgcagagaaaagctaaaaatcctataatagcgattgcattcgacatcatgaaactccttttttagaaaacatgaaaaagccaggccgtgaaagacctgacttttaccttttattgcccattgtcgagaagccggttgatgaaatatgcgacgccgttttcatcgttgctttttgtaatataggtgcttttttctttcagttcatcaatcgcattgcccatagcgatgcggtttcccgccgcttcaaacatggagaaatcattcgggctgtcgccgatggcgtaaatatcctgtttttcaattccgtacagtgaggcaagctccgtcagagcacgtccctttccggaaccggcagggaggatttcgataatgtgttttccggaagatgtctgggataatttccgatgatgtgtaatttcttctttggcgtttctcagtttttccatatcaaaagagaaacaaagaagcttgtaaacatgttcgtctccgttaaaaatcgcctgtatatcctgtacgggtttaatgccgaattgtttgaactgcgtctttgcgccctcccataatgtctgaatatcttccttaggattggcgcttttcagaatgtccagttctgcctgcagtttggactcgccgtcaaacggggacagcagatgatcatctgtatagacctcaaagtaaatgtctttgtccgttaaataagcggcgatatccttcccggcctgctgatccattaagagccggctgacgaggcggtatcctttgtcatggactgtcccgccgtttgccgcaatgatcggaatatccaaatccttcaagagcgcttttacatcaaacgtggctctgcccgtgcagatggccacgagaatgcccgcttcatccgctctttgtaaagccgctctgttttccggagaaatcacactgtccgaattcagtaatgtgccgtctaagtcaatggctatcaatttcatatgtatggatgccctccttaaaaataaagctgcttcatgtagtatgttcagctttgtgcgaaatcagcagaaagccgtcagttaaaaggctataccttcatgtcctttttttcaacagaaaaacggcgggatttgctaatcccgccgtgacatcttacgcgtctaaatcattttttaatttcgtttttacttcttgaaggttttcctcattcagcttgaagtaataaatatttttgccgtactgaggagtgtaaatgtagctgtctgaacctgtcagctgcaaagaattcaccgatttcagcgatgtgataaacgggaacagaccgatggcgtcattaagagataagttcatttttaagtttttccctaagctgtcgacgatatcgtcataagatgggatcgagcttaacgatttagattttttaataatggcgctcagcacttccatctgtctttgtccgcgcatcagatcggtgtccgctttgcgtgttcttacataagccagtgcctgctcaccgtcaagcgtctggacgcccggcttcagcacgacttttccttttgtatcgactttaatacgatcggcaattttctggcttttcacatttaccgtaacgccgttcaactcattgacgacatcgcggaacgcgtcgaagttgctttcaaccacataatctaccggaatatcaaacatgttttctactgttttataagttaaattataaccgccgtaagcatgtgcgtgcgcgaatttgtcatagccgtgtcccgggatgttgacataggaatcccgcggaatgctgagcatcgtcgctgttttctttttccggttgaaggtgacgagcacgttggcgtcacttcttgcgtcatctactgattcacccttattgtcacgggcgtctattcctaaaagcaatacggtgaaagaatccttcttcgggtcaaattctttgatccgttttacggactggtcgccgcggtcaaggctgacgtgcgcttctttggtcgcattattcaatttcacaaatgcgtaggtgccgacggaaccggcgatcaccaataagaaagcggcgaataccagtacaaatttcacccattttctgaggcgtcttttcttttttctgcgttgagatcgttcttccatatcattacctctcgtttctattctttgtgaagcgtaccataattgttgactcggagcaactctgcaaatgagaaaattctaaatctttctctctatttcgacaacatctactgttatttttgcatcaggttcacattatattggacggcaggaagcgggaaatgtttcgtcgctttgtgaaaaataatcagtaaaataatggatattaacggtgcggaaggtttgaaacgatcggaaacaggcaaaagaagcagtagaacaattccgcgcggatacagcgttggatgaagggagtctatataacatgaaaagcatacactcgaataaatggctctattttttcggcgctctcgggggcgcgttatacggatatgataccggagtcatttccggagctattttatttatgaaaaaagaactgggactgaacgcctttacagaaggcctcgtcgtcagttcgttattggcgggggcgattctcggatcgggattcgccggcaaactgaccgaccggttcggcaggcggaaggccatcatgggagcggcgctgctgttttgtataggcggattaggagtcgcttttgccccgaatacagaggtgatggttcttttccggattattctcggactggctgtcggaacatcgacaacgatcgtcccgctctatttatcggagctggctccgaagcataaacggggggcgctttcttcgctgaatcagctgatgattacggtcggaatcctcgtttcttatatcgtgaactatatatttgccgatgcaggcgcttggcgctggatgcttggacttgcggttgtgccgtcagtcattctgctgatcggaatcttatttatgccggaaagcccgcgctggctgtttacgatcggcaaagaagagaaagcaagagaaatcctttcatcattgcggggaacgaagaatattgatgatgagattgatcagatgaaagaagcggaaaaggaaaacgaaggcggcttgaaagaattgtttgagccgtgggtgagacccgcgctgattgccggcctcggacttgcctttttgcagcaattcatcgggacaaatacaattatttattacgcaccgaaaacatttaccagtgtcgggttcggcaattccgcgtctatattgggaacggtcggaatcggcgccgtcaatgtcatcatgacgcttgcggctattaaagtcattgataagatcggccggaagccgctgctgctggccggaaatgcgggaatggtcatcagtctgctcgtattggccgcggtcaatcttttctttgaacattcagcagccgcatcatggacaacggtgatttgtttaggcctgtttatcattgtgtttgcggtcagctgggggcctgccgtgtgggtcatgcttcctgaattattcccgctgcatgtccggggtatcgggacgggtgtctccactttgatgctgcatgccggaacattgattgtctcattaacctatccgatgctaatggaagcagtcggcatcagctatttatttctcatttatgccgctatcggaataatggcattcctgttcgtccggtttaaagtgaccgagacgaaggggaaaagccttgaagaaattgagcaggatctgaaaagccgtaacggaggctcgggatcagaatcaaatcggcggacagttcatccgtaatattcagttttaggggggcggttattcaccggcccctcaaaacggatgcgtgcgggcgcccgcacggtcacataaatgacggggatatgtcatacgttgtataaagtcacgataaaggcggggatgccggtgaaaacgagtattattatccttacatataatgaacttgagctgacgaaaaaatgtctggccagcattgaacgatacaccgacaaagataagattgaactgattatagttgacaacggttcctcagacggaacgagagaatacatatcaaatctgcctgacgtcaaagtcatccttaatgaaaaaaacctcgggttcgccaaggggtgcaaccagggaatcgaagcggcagggggagaaaatctgctgtttctgaacaacgatacgatggtcacgaaaaattggctcacctccatgctgagggtgctgtatcaatctgaaaaaaccggtatggtcgggcccgtcagcaactatgtcagcggcgcgcaaatgatccatgacgcgtatcaatcgcttgatgagctggagtcattcgcggaggcgtattgtgcacgggaaaagcatcaaacaaagcgggtgctgcgccttgtcggcttctgtcttctggtgaaaaaaagcgtcattgaagacatcggcccgtttgatgagcaattcggatacggttcttttgaagatgatgacctatgtctgcgcgccctgcaaaaaggatacagcctgcacatcgctctcgatgcctttgtgcatcaccacgggcatgcgacgtttacggctaatcaggatatcaatatcaatcagttatattcggagaaccgccagcgttttacggaaaaatggggcactgattttacgtactttactcatccgagaccggaaattgcggagctcgttccccgggaggcgaaacggatacttgatgtcggctgcggtgcgggagctacggggctggaacttcaaaacagacagccttgcgaactgtacggaatagaactgcacccgctggcggcgcaagcggcaaaaggacattatgaagcggtgctgcaggaagatgtcgaaaaagtgaagctgccttatccggaaggcttttttgattgcatcattttcgcggacatccttgagcacttaaaagacccgtggcgcgtcattgaaacgtactcatcctatttgtcgcctgccggatcaatcgtttgcagcattccgaatatttcccacgccgaagcgctgttcccgcttctgctcggggactggacatacagagacgccgggattctcgaccgcacccacttgcggttttttacgccgcagacggtgcgcacgctctttccggaagagacatttgacgtgaaaaagcagtcctatacgtatgttcacgtggatgagcgggtgcagctgtttttacaggaaatcacacgaatggcgcaatcgatgcaatttccggtgacacagctgcccgaacaaagccggatttatcagattctccttcgtgtcgaaaaaacacgctgaaggctaccgccccatcgttccgaagttggtaatctgaatggaaacatcatagtcaaaggccgcttcggagaaggtttcatcccagtgatgcttcactttcttccaatagtcgggatattgaatgcggactctgtcagaaaagaagacagggtccgtttcatattgattctgcagcttatcgatgacttctttcatatcgcttttcagttttttttcgaaaaccttttccagcccgtttaaatagtgctgatcgaatgaatcttctccggcatattgatcctctgacaaaagtccttttgttttcaccgctacgtgaaacgacagcttcccgtttttcagcagggggtgatggaggatgttgattttttgatctcgaaggtaattgggtgccctcctttatccaaagcgggcagcacgccgccctgtatcgtccccgtcagccaattcaggctttgtacttcgtatgatgacagaaagcctgccaatctgttttgttttccgtttttgataatggccgctccgtcatacaccgtttttcctttttgattgctgacggcctgaatgagaaaactgagtttattatggcagtaaatcgaagctctcccgattcggagcggttttaaaatcttcccgttgtagccgccgttgttcgtaaggtcgatcagcttttccgcgggcatgggctgctgctgattcggcgtcggctctgtcagaatatcggccgctttgcctcttgccgcgaagagatagctgctccgccttaattcatcatcacggataaaatggttcatcatctgcagtatattttggtcggccagcaatttgtcgctgaatatcagcacttttaaatgatcgctgtaaacgggcggatcttttaaagcgacttcactgacggcttcaagaatggtatcccccgcgacgtcacattgacaaacacgggccggccggaagcctggctgttttcactttggggcagcaggttttgataggttaatttatatcggcggtcactcgtctcgtctatcgccagcccccgggcgaaagatagcttttcgacttccttcgcatcccagcaccctgaaagcgtcatcagtatgaaaagcgccgccgcccattttacgaaatgtgtcatgacgtctgtttcctcccggctatttttttcatccagctgacaaaccagatgagaaaaggaatcataatgacggcaaaaaacgcatatccgagaatattcgcgaatgcaaacacactgttgatatcatcagggtacattgaaaggccgaatgtcactgccaataagccccccagcagccaggcattgtttttatttttcagtctgaaaatggtgtttaacccgagatgcgctcctttaaaagaaccgagcatacaggtgaactgctggcatgtccacgtaattaaaagaaagatatcaaacctttcgatgaaaataccgcggatttccaaggcgtgaatcagggaaatggtcggatatgtcaccgttttggcttcagcgatcgacatacagccgattacgacaagcagcgtaaagctgtaaaataagcctgcgcatgcgatgccgaagacggcagcctttttcgcctgcttcggatttttcataaacggcaccagataaagaatcacctcaagtcctgaaaaatacagaagggtacgcggaaacagctcaaaaaagcttttgtagcctccttccatgaccgggcggatgaaatccagtttaaacagtctcaggctgaatatgagcagcgtaatcagaatgacgatcgcaatcggaaagagataagcatagagttttgaaatgggatacaccccgccggtcacatggtagatgccgaccgccagaaagatgaatatgacgacacccatcggcgtatttttcagtaaaaagtaattgatgacctcaccgagaaaacgggcttgaaaacagacggtgacgacaaaataacagctgatgaataaattaagaagagaaccgatggcgcgtcccataatgctttgattcagctcataaatggtttccccgctgtttttctgcaaaaatggcataaagagcaggacgatgccgataaacacgagactctgcacaagaataatgatccatccgctcggactgtccgctgctgcggcggagcgcggcagtgttaacacgcccgctccgatcattgttccgcttaccatgagaagtgtctgcataaacgacagcttgtcttccggttttttcatggtgatcacctttgcttgattttatctttcgtctcttttctggtcggccgttttttcaaaagaggcgtcggcagtctgacgatcgtatcttttaagtcctgtcccggctgcgccatgatcggaataagatagtcctggccgaagcttttcaggcgcatcagatggccgacgacaagcagataacacatgatcagtccgtataaacctaatatcgccgacaaaatcatcgaaaaaatacggatgagtctcagcggaaaattgaacgcataggagggcgccgtaaaagaagccaatgccgtaacggatacgataatgaccatcatcgcgctgacgatgttcgcctgaacggcggcctgcccgatcaccacgcccccgatcaggccgatcgtctgtccgatcggcttcggcagcctgagtccggcttctctgatcatctcaatcgtaaaaatcataataaacgcttcaacaaaagggggaaacggaacattcaatctgcttccggcaatcgtcaccgccattctcgtcggcaaaagccccgtgtgaaacgtaacgagcgatatgtaaaggccgggtaaataaatcgtgattaaaatgcatgtataccgaagcagcctgagaaagttaaccggaacccaccgctgattataatcgtcaggtgagtggataaattcatcaatggtagccggcaccaaaagggtaaaaggcgttccgtctacaagaatggagacccttccttccaaaagagcgcccataacccggtcgggccgttcggtcgtcaagacggtcgggaaaatggaatacgtgttatcttcaataagctgctcgatcgttcctgattccggaatgtcatcaatggtgatcgaatccagtcttttcatcacttcttttacaacatcatcaggcgcaatatcccgaatgtaggcaacggcgatccgcttttttgtccgttcgccgagtgtgatctctttgatctggaggttgggatcaccggactgctcgcgcaaaagcgccgtattcgttcggagcttttcgacaaaacctatcctaggtccccgttcaagcacttctgaagccggttcttcaatatcacgcattttaaatgtttccgtttcaaacgaaagggcttcctcccatccctccgccagcaaaaccgatttgccggaaaaaatgtctgcctccgcgtccttaagtgaagaaagccgggtgtgacgatagccgaaagagatggatgacggcggtatttcagccggttcctcttgatgcagggcggccgcctgcacgggcgaaataatatattccgcaagcaattgattgtcggtcagtccgtctatatatataaggcaggcgtcacatttgccgtttccgtacgtaaacgaataaaacatcatgtcatcgctttggccgatccgttttttcagcgcttcaaggtttttgccgagctccgcatgtatcgtcataatgttcccccctttccatcagttattttaatttgcgacaaacaaggcattttattctggaataggaaatgactgagcattccgccccatccgaatggtataatgagcaggtcagccattttatacatattgtttttaaccgcggctccctccgtgttttaaaaaagacacagggggaatgggatatgagccgctttttaaggggaggggaacgaacatgacgcaagagccgatttttctacagcctgtatgtaaagaaaaaatatggggcggcacgttattacgcgaacgattcggatatgacataccttcagaaacaaccggcgaatgctgggcgatatcagcccatccgcacggaatgagcacggtcaaaagcggtccgtatcaagggaaaaccttgatggacctgtgggatcagcatagagagttattcggcggaacggaaggggaccggtttccgctgctgactaaaatactggacgccaaacatcatctgtccgttaaagtccatcctgacgattatgacgccgaggagcatggacagggcgaaacggggaaatctgagtgctggtacattattgactgtaaagaaaatgcggaaatcatatatggtcatacggcccgttcgaaagcggaacttgtcaccatgattaacagcggtgactgggaaggcctgctgcgccgcgtgaagatcaaacccggcgatttttattatgtgccgagcggaaccatccatgccatttgcgccggagcgctcgtgctggaaatacagcagaattcagacgccgcctaccggatatatgattacgggcgtacagatcaaaacggcggtgcgcgtgagctgcatatccgcgatgccgtcaacgccgccaccgttcctcatgtggacggatttttggatgaatcaactgaaacgagaaaaggcatcaccattaaaacctttgtgcagggagaatatttttctgtatacaaatgggatatcagcgggacggcggaaatgacccaggacgctccgtttatgttatgcagcgtcacagaaggaagcggctccatcatctttgaaggcaagtccgccaagcttgaaaaaggcgcgcatttcatactgccggatcagatgcctgactttacgataaacggagattgcacgatcatcgtttctcatatataaaaccaaacttaatcccagctctgggattaagttttttttatttggataattggatgatttctctctgtaaaaatgaagaaagcgggccgataaataaactagtttgatagaaaccaattgaatcagaaagaggagaaggaatgaaaaagagattcgttgcacctatgttattgtccgccgttttccttgtctttagcaccgttacacagcacgccgaggccgcatacagcgactactccgtttacgagctggaaacgaagcagcaatttgcttctgagaacgaggcgcttcaagcggcagcgaaattgaaaaaggatacggggtggcaggctgacgcaaagaaagccggaaatgcgccgctcacttatcaaatctcagcttcaggcttacacgatgaaacggatgcgaaaaccgtgctgaaagattttacgaagcagacgggcgtggccggcacttacagcgcaagcggaagcaaacagccgtacgtgaccgtcacatcaggcgttctatcagacgagcggcagacgaaaaatcttcttgccgaactgacgaaaaaaacgggcgtgaccggcgccgtcaagccggcggggacaaaacagccgtataagcaggtcgtgacttctgagatggcggccgatgcggatgcaaaagcgctctcgcaagcgttgacgaagcagacgggcgtgaaagcgtcataccgtcagatcaaacgggaaacagcccggtttcagatccaatcgggaacaatctccggcgatcaaaaagccgctcaaattcaaactgattttcaaaaggaaacaggattgcagtcgtcgctgaaagtcacggcaaaggccagtccgaatatcaccgtgacagcctctgacattttaaatgcaaataatgcggcaggtttagcgaaacagctgcagcagaaaacaggcgtcaaagggaacgttcaaaagtatgcccaaagcaaaacagcaaccgtgtataacgtgcagtcaggatattttaacggagtaagcgccgtacaaaatgctatcacccaaatcaagaagaatacgggtgtcagcggaagctatcaaaaagccggcaagaagaataattacacggtcgcgatgagcggactgacggctaaacagctgcaaagcgtgcaagctttctttaaaaagaaaaaatggcattgcgacgcatcgcctgtcaaaaagacagcatcagtgtccgtttaccggatcacggcagggcagcttaccgctgcaaaggcggatcaaacggaggcgtttttccgccagcagcatgtaaagacggcaagaacagcggcgggaaaaacagcagaaaacgaatatcagctgctttctcagcagacggcagaccagtcgaagataaaaaaaggattgaatctgctggcgggatataaactgactgccatttcaaaaacgatatccaagcagacggacacaacgtaccaagtcacaaccgaatcactgcttgatacggcaaagatcaatcaatcgctggattttttcaaagggaaaaaagtatccgcctccgcacagaaaacaggtgaagcggcgtatacacaattcagaattgaaacggcaccgctgcttaagaaggaagacattgaccgcgtgactgcttttttcaagcaaaacaaagcggccggcactgtgaaggagacggggaaaaccggctctgcacaatacgtcatcaaaaccgaaaaattcagcagtaaaaccgttttaaataaaagcatgagctttttcagcgccaaacaattacaggccggctatacgagtgaaagccatccggtttatgaactccgcattcgcaatcaattcacgggagcgcagtcagcggacgccgcctcccaaaagctgaaaaagctgtacggatggacgatggctattctgaaaataaaaaacggaccgcaaatcatgaacaccaattacaacatctcgctggcagatatggtcaaaaaacaaatgacagtcagcccgcagactgatgccgcggcttatgcatcgcttacgtacatcaatacggcctccggaacggtcacagccgacgtcctgaacgtccggtcaaccccggaagtcagctcaggcaatattatcgggcagttgaaaaaaggcgataaagtcagcatcacaggccagacaaacggctgggccaaactcagcatgggctggagaaacgccagcagtgacgaagtcgggcagtacgtcaatccggctcacttcgcacaagacagcaagtattactttcaatttctgaagctctctcagacagccggactgaacgcatcggaactgaatcaaaaagtgctggtcaataaaggaatactgacagggaaaggccaggcctttattacagccgccggcaaatacagcattaatgaagtgtatttgatttcgcatgctttgcttgaaacgggcaatggcacgtcagagcttgcgaacggcattatgtataatggtaaaaaggtttacaacatgtacggcatcggggcttatgacagcaacccgaattactacggcgcacaatacgcgtataagcaaggctggtttactccggaagccgcgattatcggcggagcccaatttatcggtgcgtcttatattcacaatccttcatacgagcaggatacgctgtataaaatgagatggtctccagccgcggctcatcagtatgcgacagacatcggctgggcgtataagcaggtaaaccgcatgtacagcttatactcactgctggatgactatacgctttactatgatgttcccgtgtatatgaaagtataaaaaaagggctgaagtgtatgcttcagccctttcttcatgcaaaaaacacccgcctcagattcaggcaggtgcttcagcacaatttttcatttttgtttccgcaaatttcaataacgcttcactcgaattcccatctgaatacatattccatttgtccgagaaccgcttcatttcttctgcatcaaatggctttttcgtcatttcctccaaaagagcttcactgtcatgacaagcctttccgggaatgacggaagtataattgtcgattaaaccgcgttttcgatcatattcctccagatcatacgtgaaaaagaaaatcggtttatttaagagcgcgaattcaaaaggcacggaagagtaatccgtaattaaaatatcagccgctttcaagagatcatgaagacgcatgtcagacacgttcttgatcaattcgctttcaaacgaagccgaaatatgatgcaaaacggcaggatgaagctttacaagcagcatatactctccgtttaacgcgtttgtgagctgttcttcggtgaatggcagccgaaaggactgcatatcataatccctgaatgtcggtgcgtacaggatgatttttttcggccatttgtgcttcggttcgggcttgtgttcttcataatagacgtcagtcagggggacacccgtttttaacagctggccgtcccgtatgccgaacgactttttaaaaacgtcagccatcgcgtctgaaccgacggtgacaaagtcaaacgagcggtacacttttttaaaacggctgatgtctgatgccggacggttttgattcgtcacatcctcaaggccgaactttttcaaagagccgttcgcatgccacacttgaatacatgtcgtttgcggccggcggtttaagacgcttgtcatgaggaaatagttatccgttatcaccgctttgctcttaaaaaggatcaaaaccgccttcaaaagatgcagcggatgtttttcgttcagataaaaagagccgagtccttccagctcttttttcagactgacggcgtgtctcgtatacaaaaccgtcacttcataagaaagcgattcagcgtgcgctttgtaagaacggatgagagcctgtgcattctcttcaaaagataccagcagggtcagatggttcttgggctttacaggcttgaacaaaacgcccagaacagacagatatatagaataaaaagcggcgaataaagatcgcaagttcatagattaccaatctcttttgctgttttatttgtttaaagctgtttcgtttgatcttctgcctgctcggaatacaggcttttatttgatttattatttctcaaaacggtaaaagcatacttcggaatgttcagcatccttttccatctccacggattcgtcaccagtctgtacagccattccagattcgttttgatcatccattcaggggcgcgtttcaccgttccgctgaacacatcaaagcttccgcccaaaccgatcgatacagcctgagggaaaagatgtttgtattcataaataaattgttcctgatggggatatcctaaggcgacaaacacgagatcgggtttcgcccgggaaatctgtttggcgacgaagcgtttatccgcttcataaccgttgctggctccgacaacctcaatattcggatactctttgccgatccggttcaaaacggcgtcaagcacgtcttgcttagctccgtataaaaatatttttttagactgccggtttgcgagaccgagcagcgacagaaatacatcgaatcccgcaattcttgatttcagcgggtgctgcgtcaaacgtgacattaacacgacgccgataccatccggcaggacgaaatccgcggaagaaatgacttgatgataacctttgtctttcgccgcagcgtatccgatctcagggttgaccgtcgcaatgacggctccttgcttttgtgcgatataataagtgtctaaatatgaaataaactcctgtaaatttccattaacataagaaaggttgtgcaccatttcagtctgcatctgccgtcctcctttttgtacgggattttctttcattttttcgtgacttaagctaagctttattttaacataataccttcagataaacttaacaatagttttacaaaaatataaataagataacaatttctttaatcaaccgcgcaaaaaccctgctaaactcctattgcaataacatttgttaataagtggaatttaacttcgttttacattagcttaaccttttcagggctatgtgatataatgaggttccatgagtacgaaattggcactttagtgattaaggatacagctgcgcagcatttcagggcagttgcttgttatacgtatgatgatagaaaggagcttttgtttcatgaagaaggtcattacttacggaacgtttgatttactgcattggggtcatattaaactgcttgagcgcgcaaagcagcttggagattacctagttgttgccatctcaacagacgagttcaacctgcaaaaacaaaaaaaggcctaccacagctatgaacacagaaagctgattctggaaacgatccgttatgtcgacgaagtcattccggaaaacagctgggatcaaaaagtacgtgacgtagcggatcacaacatcgacgtgttcgtaatgggagacgattgggaaggcaaattcgatttccttaaagatcaatgcgaagtcatctatctccctagaaccgaaggcatttccaccacacagattaaaaaagaaattgccggggtgtaattgaaacattcggatatacagatgataaagaagtactccctccggatagggagtacttcttgtaatataaggttattttcgctatatttgttatgcgcttttgaaaaaaagctagacaataagaggagaatttaaagatgaatcttagtaacttttttaagttgaataaaaaagagtccaagccgtccatagaagaacgcgaatataccattttaaacaaagaagcattggcggaagagaagaaggtagcggtagtcgttcctgtttataatgcagaagaatatgtaaggaaaacagttgattctgtgatccttcaaaacatcggctttcagcatatttctttaattctggtagatgattgctctaccgatgattccagaaacatcctgactgagtacgccgaattgtatgaaaatattacagttgtctttttgaaagacaacacgggaactccggcttatccgagaaacttgggaattgagctggcaaatgcgaagtacattacatttttggatgcggatgattggtttgcgccgaacggggttaaaatcttattcgacatgcttgaaagagatcatgtaaattatgcggtcggaaaaacgatcgaaatgcaggtgaacggtcaaaaaacgatcgggaaacatgagtcttcgctgaacagagcgaaggtatcgcctttttcaatccggcatattttctatcatctgggcccgcgggcaagaatgatgaacttacaatttctaaaagataacgatatcagatatccggaaatgaaatttgctgaagataagcaattttttatggatgttcttttggcgtgcggagatatttcaacgtcaaccgaaccggtctattatctgaacagaatggacaataatgagtcgctgacaaagcagaccaatataatggaaaaaaccgacacgaacatagccgtaatgaagtatattctgaacaaaaaattagatactgaaaaagagaagatggcgatgaaccgcctgattgaattcgattccattacgcggcttttcgatcggatgcacttcctgaaaagcgaaaacaaagaagcctactacaataaattcaatgaaattctgaatgtgttaaagaagacgaaatacgatatttccgagacattttttcatccgattcataaaacagcctaccgtctgctgactcaaaaacggtatgatgaggtcgaaaagctgttccgctggtccaaaaaagagcccgataaaaacatcgtgacgaaagacggactggcttatttagaaagcccgctgacggatgaagaaaataaactggtcgaacttcgcatgcacggagaaacggaaagcgcggtgttcgccgatcataaattcaccgttacgttccgcttgttcggacaggacagaaataatgcccaatatattcagtttcagcacagagataacatgaaagtacaccaccagtttccggttcagtcactgggagacgggcggtacgtccttgaaatcccgttaagtgacattgaaaaagtcggacttggcggttatattatgtatgtcatttataacgattatgaacgtgtcatgttaaacagagaagacggtgaaaaggtgacggcagaagcgaacggactgcaatatcaattctaccggacggtgaaggagaacctttcactgaaagtaacaaaatgatgattgtgattggatatgtttaattgaaacagaggagtagacttattttatgggtatagaaaatcctgtcagatacaagttaaaacatcttaacataaaggaagagacattcagcattacgatatcctgtgaaaatgtcactgcaggggaagagccttctcttcagattataaatcgtaaaacaaaagcggaactttccgtccctctgaaacggttggccggagagggcggagagtaccatgctgtcatgagcacggatctgctttctgaccatacggacggcaaaggatgtctggatttctatgtctcctttatcaatgatgacagtgatatcagtaaaaaacggttaaaatccagccttgaacctattgaactgtcttcttataaagatgaggctcatcatatgtactttttcccttacacgacgaagaaagggaatttctccttaaagctgctgcagaaaaagttcgtcacgcggattgatgaaatggagctcgaatctgacggcagcttacatctgaaaggttttgcattccggctgaatgcggcagaaaccttaaagataaaagaaaaaaacctgattctgaaaatgaaaaaaggaaaagaagaggagcctctcattctgaagtatccgcttcacgacgtgccgagacacgaccttgatgaatatgttcaggacacaacgatgcttgacacgataggctttgatacaaaaattgatttgaatgctgtttataaagaattgaatcagcagctcatctttcaattccatattcaattcatttttgaagatgccgggacaggtgaagaggttatcaccaacagcaaaccgttaaaggttctgaaatctgaacatgtaaaccctaaccaattcacggttctgaaaacggaaaaagggcctgccagatttcacgttttcacgaaaaagaaaacgaaaaatctccacctgagaatgaacgattacagcttcagcacccgcgtggagtattttgtgaaaggtaagctgaaacggggcgcttcctttgtacgcaagagaaagaataagctgaaaaagttcattgagaaaagaatacagaacacttacaaagcaggattcagatttgcaggaaaactgcctgtcaaacagaaacttgtcatgtttgaaagctttgccggaaaacagtacagctgcaacccgcgggcgatttatgaatacatgagcaaagagatgccggaataccgtctctgctggagtgtaaaccccgcttactcacagacatttaaagataaagggattccttatatcgaacgcttcacgttcaaatggctgtttgccatggcaagagccgagtactgggttgtcaacagccgtatgccgctgtggattccgaaacctgagcatacgacatatgtccagacatggcacggcacgcctttaaagcgccttgccgtagatatggatgaagtgcatatgcccggaacaaacactgaaaaatacaagcgcaactttacgacagaggcttcaaagtgggattacctgatttcaccgaacgcatattcaaccgaaatattcgcccgggcgtttcagtttaataaaaccatgattgaatcgggatatccgcggaatgacttccttcagacggataacagcccttctgtcattaaagcgctgaaagaaaaaatgaatcttccgcaagataaaaaagtgattatctacgcaccgacatggcgggatgaccaattttataagaagggaaaatacaagtttgaccttgatttagaccttcaccaattgagagaagcgatcggcgaccgttatgtcattattttacggatgcattatctcgtggcggaaaactttgatctcggaccgtatgaaggatttgcgtatgatttctccagctacgaagatatccgtgagctgtatatggtctctgatttactcataacggactattcctctgtcttttttgactatgcgaatctgaaaagaccgatgctgttttatgtgcctgatatcgaaacgtaccgggataaactcagagggttttactttgactttgaaaaagaagcgcccggcccgcttgtcaaagaaacaggtgacgttatcaaatgggtcaatgaaacggaatcagatgattataagcttccggattcgttcgggcctttttacgagaagttctgttatttagaaaccggagaatcgtctgaaaaagccgtaaaagtgattttcggggacaagtaaataagtgcaaaaaagcataatttaaccatgttaattatgcttttttgcttaagtgacggcatgttgcgctcatgggactcaggcttgttatgaagtgaaaaatacatcgtaatctgttacaattatgagcggtgcttttgtaagtcaaagctattacctaaaacttacgactaaggaagattagaatgaatgcattggtaaaaattctgaaagagcaattcaactcatttccgctgattatgcggcttgcagtgtacgaaacgaaatcaaagtatcaagtgaactatttgggtatattgtggcagtttctcaaccctatgattcaaatgctggcttactggttcgtatttggcctcgggattcgcggcggacatgatatggtgcttggaaatggagacagcgtaccgttcatcgtctggatgctggccggcttaattccttggttctttatcagtccgacgatactggatgcatctaacagcgtttttaaacggataaatttagtgtcgaaaatgaactttccgatcagttcactgccttctgtagtgatagcatcgaatttattcagttactttgtgatgatggcgatttatattattgtgctgctgagcaacggactgtttccgacgcttcactggctgcaatatatttattacttgttttgcatgatcagttttatgtttgctttcggcctgtttaattcaaccatcagcgtattaatcagggactatcagtttttgcttcaagccgtcacaaggcttctcttttttcttctgccgattttctgggacattgcggagaaatttggaaacagacctgaagttttgaccatcttgaagttaaaccctcttttctatattatcgagggcttcagagacagctttatggaagggcagtggtttttccacgatgtgaaatacacgctgtatttctggttcgtcacactgctgctgttaacagtcggttcacttcttcatatgaaattcagagataagtttgttgactttctttaatatagtaaggagattatacgatgaaactaaaagtttcgttcagaaatgtttcaaaacagtattttctatataaaaaacagtctgacaaaattaaaggattgtttttcccaaacagaaatcaaaaaggttttttcgctgtccgaaatgtttcttttgacgtctatgaaggggaaacgatcggattcgtaggtatcaacggctcgggaaaatcaacgatgtccaatctgcttgcaaagatcattccgccgacaagcggtgagattgatatgaacgggcagccgtctttaatcgcgatttctgccggattaaacaatcaattaagcggcaaggacaacatccgtttaaagtgcttgatgatgggtctcaacaatcggcagatagacgagctttatgaaaaaatcgttgaattcgcggatatcggcgactttatagatcagcctgttaaaagctattcaagcggtatgaaatcccgtctcggttttgccatatcggcgcatatggaccctgacatccttattattgatgaggcgctctcagtaggggaccagactttctatcagaaatgtgtggaccgcattacggaatttaaagaacgcggcaaaacgatctttttcgtcagtcattccatcggacagattgagaaaatgtgtgaccgggtggcttggatgcattacggcgaaatgcgtatgttcgacgaaacgaaagccgttgtaaaagaatataaagcttttgtggattggttcaacaagctttcaaagaaagaaaaaaagaaatatcaaaacgagcagattgaaggcagaacgcgggcagccgaggaacagaaaatcactcaggcccagcaaaagaaagcgaagcctaaattcattgccaatacgatacagattacgctgcttgcattgctggctgtcggcgcaggcgcttcgatgttttcagacaagcctctgcgtgcgatcacatctttcggtgacgtcaaacagagcgatgccggcctttatgagtctgtgaataaacctgctttggtaaaagctgaaaaggcggacctttacactgaaaaagatataaaaggaaaagcctccgcaagtgtaagtttcggtacgaaggtgcagatagaagccgagaataaccaggcggctaaagtgaaattaaacgataaagagtactttatgaaaaagactgatctatataaagtgaacgctttaaaaaagacggatgttcagctgaatgatttcagcggcagtttatcaagccaaacagcagaagagtttctctcatatctcaataaaagccgggacgatgtgcagcgtaaattgaaaaatccagctgcgggacaaacggctgacggacggaacgtattaaaagcatccgatgcaaaaacggatgtagtgattgacaatgatacagtctccgaagtggtttttcatttatcgcgtcctgcagacatctcagctttaagtgaaaaaggcggcagcaaaatcaatcagaatttgctcatgcttaaaaaccaggaatatactttttctgtgaacaatgctgataagacactgacggtaacgtctaaaaagtaaagatcacataaaaaaagctgccggattcggcagctttttctattcgtcagcttcttctttttcaagaagatccttcatgaacggaattaatttatggcggatatcctgatcctgtaaggcaaattcaagcgtcgtctcgataaatcctagtttttcaccgacatcgtaacgttttccttcgaaatcataagcgaagacacgctgaatgtcattgagcttttggatggcgtccgttaattgaatttctccccctgcaccgacttcctgctgttcaaggtacatgaaaatttcaggagtgaaaacgtatcttcctaaaatagccaagttggaaggagctgtgcccggttcaggcttctctacaaaatttttgacctggtaacggcggccttcatttgttaacggatcgataattccgtagcggtgtgtgtcgctttcaggaacttgctgaacaccgatgatggaagacaatgttttttcgtattcatccatcagctgacgaagtcccggtttttcagcctggacaatatcatcgccgagaagaacggcgaaaggttcatcgccgatgaagttgcgtgcgcaccaaacggcatgaccgagtccttttggctctttttggcgaatatagtggatatccgcaatatttgacgattttttcactttttgaagcagttcgattttccctttttcttctaaattgcgttccagttcaggggcattgtcgaaatggtcttctattgctctttttccttttccggttacgataataatatcttcgatgccggattcgacagcttcttcgataatatactgaattgtcggcttatcaacgattggaagcatttctttaggcattgcttttgtggccggcaaaaaacgagtgcctaaacctgctgccggaataatggctttgcgtactttcttcactgaataacaccatccttgtttctgcaaaatctttttttcagaactataacctagtctttttccactttaccacaattgattaaaattcacaccttttaatccgctttcaaagagtcttgtaacggtttttgctttgtttgccattaagctttacaatattaagaaacggcataaatatgttaacatgaagggatatccgacatataaaacgaggtgcagacaaaccgttgaaaaaactaaaagtaatgaccgtattcggtacaagacctgaagcaattaaaatggctccgctcgtattagagcttgaaaaatatcaggaaattgattcgctggtgactgtaaccgcacagcacagacagatgctggatcaagtgcttgaagcattcagcatcacgcctgattttgatttgaatattatgaaagagcgtcaaacgctttcagaaattacatctcatgctttgctgaaactggacaagctgtttcaagaagtaaaaccagatatcgttttggtccacggagatacgacgacaacgttcgccggaagccttgccgccttttatcatcaaatcgccgtcggccatgtggaagccggtctgcgtacgcaaaataaatactctcctttccctgaagaaatcaaccggcagatgacgggcgtgatcgctgatgtgaattttgcgccgacaagccaggcagaacagaatctgcttgctgaaaataaaaagccggattctatatttatcacgggaaatacggcgatagacgcgcttcaaacgacagtgcgggaagactattctcatccgatttttgacaagctggaaggaagcaggatgattcttttgacagcgcacagacgtgaaaatttaggcaggccgatggaacagatgtttaaggccgtcagaagaatcgttgaagagtttgaggacgtacaagtcgtttatcccgttcatttgaatcccgcagttcgtgaggccgcagaagcccattttgctgattcggacagggtgcatttaatagaacctctggaggtcgtggatttccataacttcgctgcgaaagcaaatttcattttgaccgactcaggcggggttcaggaggaagcgccttctctcggaaagccggtcttggtgcttcgggacacaaccgagcgccccgaaggagtgaaagccgggacattgaagctggcgggtacagatgaagaaacggtgtatcagctgacaaaacagctcttaaccgatcaggccgagtatgaacggatgtcaaaggcgtcaaacccttatggtgacggatcggcctcaaaacggattgcggaagaactgctttatcggtacggctatagaaaaacccgtccgcagccttttacagaataaaaaaactctgcatcatatgcagagttttttattatttcaggctttcttttaattcttttttgactgaagcgaggcttgcttcatctaatttgtaataatagatattgttgattctcgttcccgttcccttcagttcatgctgagtgactttgctgcgggcatttttatagtcagtcataaccgtccacatatcatcgaatgacatgtttgttttcatattgttttcaatgaccttaaacatatctccgaatttcgtgacagacgagatgtttgcccccttagaaataatcccttcaatcacttggcgctgccgctgctgtctgccgaaatcccctcgggggtcttcttttctcatgcgggtgtaggcaagtgcttcttcgccgttcaggctgatgttccccgttccgaaagaatgcccgtcgtagttgaaggcgaacgtgctgttcaccgtaatcccgccgagtgtatccacggtatctttgaagctctccatgtttactttcacaaaataatctaccggcacgtcgagcaggtcctcgacggtatccgcggccatttgggttccgccgaaggcataggagtggttgattttatccatcgtacctttgccggagattttcgtatacgtatcgcgcgggatgctgaccatttccgttgtattcgttttaggattgacggtcatataaatcatcgtgtccgcgcgccctttgtcatttttccgctcatcgactcccatgattaaaacagaaatcggatccttctttccgagatctatatccgtgtcacgtttgtccgatttttttaagtcttcctgaatgcttgccaccgttgaagccgctttgtgccacaagtagtagacgtagcctcctgatgataaaactaacagcccgatgattgttacgattgtcagaagaacctttttcttctttctttttcgttcagctctcatttgtcatcaccttttctattaactttcatgatgcaatttactaatctttataaacccagtcatatttttacttataaccatgtaatagacgaaattcttaaaaaaaaggttacaaaaagaccttaaaattaccttaaaaaaaagttagtataagacgatacataaagatgaggtgaaaaaaatgaaaaaaactattgcagcttcgttcttaatactgcttttttctgttgtattggcagcgtgcggaacggcggaacaatcaaagaagggaagcggttcttcggagaaccaggctcaaaaagaaacggcatattatatcggtatggcggatacgcacacaattgaagtaaaagtggatgatcagcccgtcagctttgaattttctgatgacttctctgatgttctgaataaattcagcgaaaatgacaaagtcagcattacttatttcacaaatgataaaggccaaaaagagatcaaggaaatcgagaaagcaaaataatacaccatgatcagcaaaaggcgggataaaaattgaagaaaacaatatgggctgtctgtttttctgtgatattcagcctggctttattaccggaaagcacttttgcggccagttctgatatctcagtaaaactgacgaattatattggtaataaatcgactctgaatatcgaaccttcaggaacttataaactgacgggaagcgatgtgtcctccgttgtcagattgggaggcgcgtccaaatatgatacggctaacgccgcgacatctaagtattggaaaaacccgtccaacgtagtcgtcgtgaatacggacgcttattttgcggacacgctttccgtcattcctttagcgaataaactgaaagcgcctgttctgctgactgaagcgaaaaaactgagcagcagcacagaagcgcaaatcaagaaattcaatccggataatattttaatcatcggcgggacgaacagtatttcgtcagccgcggaaaagacattgaagaaatacggccgtacgaaacggatcagcggaaaaaacagatatgatctgtccaaaaatattgcggccgaaatgggcagctatgaccaggcggtcgtagtaacggggatgtatatacggatgcgctggcaatcgcgccatatgccgcgcaaaacggctatccgattcttctgacgaaaaaagactcccttccgagctacaatctgcctaaaaaagtgatcatcatgggaggcacttcaagcgtcagcaaagatgtggagaatcaaattaaaaagaaggcctcggtcaccaaacgaattaccggatcaaacagatatcaaatatcagcaaacgcagtcacttcgcttggcatggatgcaagcaaaacggtggctgccaacgggactaaattagcggacatcgtagtcggatcaaatattgccgccgcaaatcacatgccgcttgtatacatcaaaaaaagcgaaacacccgccgacgaggccggcctttttaaaacgaaaggcacctattcttatacattaataggcagcgcgaattcaattgccgattcagttaaggctgcttacgcaaaagagttttatctcgtaaacggaaagacgtaccgtattgaaacgtccggcggcaaattaggcgttgcaggcattaacagcggaaaaacgtctttcaaggcggttcctgaaaaatattcaacagcaaacacaatcagcattgacgggaagccatatctggggaatatgagtttcactgctgaatccggcaaatatgtaagacctgttaatgaaaacattccttttgaggattatctgaaaggtgtcctgccgaatgaaatgccgggaagctggccgacagaagcgctgaaagcccaggctgttgccgcccgcacctactctatcggcaagatgggacaaacagtcgcggatacaacggcctttcaggtttacgggggatacagctggtatccaaacgccaccgcagccgttaacggaacaaaagggaaagtgctcacttattccggcagattgatagatgccacttactcatcaagcaatggcggttacatggaagccggcgatgaagtgtggggatcgaaagtgccgtatttagtagccaaaaaggacacaaaagatcccgaaatcagctggtctttaacattgcagaagcagcagctgccagcgggtctggatatgaaaaatcccgcatcctggtggtctaaaacaaacgaagcaaatgctgcgcagctcaacggaataaaaaattggctgatgaaaaataaagaaaccaatgcaagttccataaaaattgcaagtatctctgatctctcgctcaccggaaaaacaaaaggccagcgcgcggaagacgccgcggtgaaggtcacgtaccatgtgaatgacaagtcgaagggctatgtcatgaacaagactgcatctgttgaggtgaaagcgtctgaacttaggacgatgatcggagcttcatcttttaaaagcacatacgccagtgcgtccggtaattcttcgcaaatcacgatatcaggaaagggatacggtcacggcgtaggaatgagtcaatacggagcaaaagaaagagcggaggccggagagccgtatacttctattcttgcgttctattatcctaatacagcacttacaaactactaaacttctgtggaggagatcggattgaaattcatcataaaatgtctccccgtctttattctcggggtcattctatttgtcccttccgctttggctgacaacacggttaaaaggatcggcggaagcacccggtatgatacggctgtactggcggcaaaacaatcatggggtgaagcgaaaacggtaattatcaccggcggaacttcatatgccgatgcaattgccgctgcgccgcttgcatatcaaaaaaatgcgccgctgctgtttacaaataaagatcagctgtctgccggcacaaaaaagggattaattgatttaaaaacgaaaaatgtgattatcgtaggcggcacacctgccgtttcgaaaaataccgcaaatcaaattgctaaattaggcatcagtgtcaaacggttatcagggagcacgagatatgccacagccgcaaaagtggcgggtgaaatgacaagatcttctacagcccttgtggtcaacgggtttgttgatgcggatggaatggctgcgatttcttatgcgtccgctaaaaaatatccgattttattcactaatgattcaacgttaaatggttctgcgtccaatgcgatcaaaagcttagggattaaaaacacgattgtcatcggcgggacaagcagcatcagcagctcactttataataagctgccgaacccttcgagaatcagcggcaaaaaccgctataacctgtctgtgaatcttgcaaaaaagacaggcttaagcacaggctatacgtttgttaccaatggctttaaagaggcggataccatcgtcggaggcgtgctgagcgccaaacagggaagagttcacctgctgacgaatggagacagtctgtcaaaagacgtccggacgtatatcggaagtaaaaacatcaccagcttcaccgtcataggaagtgcttcatctttaagcaacaatgccgcgtcgcagcttaaaaatcccgttgtcggcaaaacggtctttattgatccgggacacggctatcaggattcaggtgcaaccggaaacggcttgcttgagaaaaatgtaaaccttgatatcgctacgcgtcttaacaatcaattatacggcgcgggcgcgcttactgtaatgtcaagaaagggcgacacctttgattcgcttgaggagagagtgaacaaaggggcgaaggcgaacgccgatattttcatcagcgtccatgcaaatgcgaatgataacagcagtgcaaacggtacggagacgtattatgataaaacctaccaatcggcaaacagtctgaggcttgcccaaaatattcagccgagaatggtttctgctctcggcacgcgtgaccgcagtgtgaaaactgccggattttacgtcattaagtattctaaaatgccgagtgtcttgttagaaaccggttttgtcacaagcccgattgatgccaatattctaaaacaatcaacgaaaaaggacagactcgcggcggggatcacccaaggcgtttcctcctatttcagataatttttttcatggaaacagaccggttcataccggtctgtttttttattttttcattatgctttgtctcaaatatggatatgaatagatttacaataaaaaaacaataatcgaaacattctaataaacattaacgtttcctttacttccaattaacatccatctgctaaactcacggcataggtcatcaaacatcccaacaaatcgtgaggtgtgtgtcagtgggagcagagaaaagcatgaatgtaaataataactatgcagtgcggcaggggacttccgctgccgttacggaaagaacggcccgttatttggcttttaagcgattcatggacattgtgtttgcgcttgcggggcttttggcggcgctcccggtgatgggcctgttctccatactgattcgtttggagtcgcccggcccggctttttacaagcaggagcgggtaggcaaagacgggaagccgttttatttgtataagctccgctctatgaaaatagatgctgaaaaatcgggggcggtctgggcgctgaaaaaggatccccgcgtgacaaaggtcggcgcttttatcagaaggacccgtattgatgagctgccgcagctggtaaatgtgcttcggggagaaatgagcctgatcggcccgcgtcccgagcgtcccgtgtttacggaacagtttcaggctgagattccggggtttacggagcggctggccgttaagccgggattaagcggctgggcgcaggtcaacggggatatgacatgacaccgagggaaaaactgatgtttgacttatattatatccgcaacctgaccttttcattggaactgaagattatgctcaaaacgtgcaaagtgatctggaccggtgacggggcgcgataaaaattctggtcagcagacaaaaaagtagggaaaacgatgcctagtattacaaatcaaattttgagcggcgccaaatggacaagtatttcgacagcgtgtattacggtcattcaaatcgtccaattcgccctgctcgggcgggtcatgtcactggctgaattcggccttgtcggcatgatcacaacggtagtggtgtttgcccaaattgcgcttgatatgggttttggcgccgcgctcattcaaaaagatcatgtgactgataaacagatgtcttccttgtactggctgaatatcataacggggcttgcgctgtttgcgctgctgttcttcagcagtccgctcattgccgatttttatcggcgggaggagcttgtctatttaatccgcgtgctggccgtcatgtttttaatcgcgccgatcggtcagcaatatcaatatatgctgcaaaaagcgctggcatttaacacgctaagcaagattgaaatcttttcaaatgtgctgtccttcgtttacttggcggctgcggttttttatacggacccgattctcgcctatgtgatttcccaggtgctgctgcaatcgtcaaaaggtattctgtactgggtgtcctgcagaaaaacatggagaccggtgttcgtttttgatctgaagggaatgaaaggcttcttttctttcggagcctttcagctgtcttcccggcttgtgaaccggctcggggcgaatattgatatgattctgatcggcagttttatcggcgccgaggcgctcggcatttacaatctggcctaccagattgtcacgcttccggtattaaaaatcaatccgatcattacgagagtcgcgtttcccgtctttgcgaaaaacaagcatgaaaacagcgtgatcagagaaggttttctcaatatgaccaaaatactcgcgctgatatcctttccgcttttgctcggtttggtttcagtatcggatgcattcgtggcttcggttttcggagaaaaatggctggcggctgtcccggttttaaacgttctcgccatcgtcgggattttaagggttctgatgaatccgaacggatctgtgctgctggcaaaagggcgggccgatctggcattttattgggacgccggggtgatgctgctgtatggtgcatctttgtacgccgccgtgctgtccggaaatctcttgacggtagcctggacgtacgctttcatcagcatcctgaatttcctgatcgggcgctggctgctggcatatgtcattaagctgcggctgtcggcttacttcaaagccgtggccaaaccgtttctgcttacggcggcaatgggtgtcatcgcctttacagccagcttcgggacggagcggatcagccttgatgtcaagctgcggctggcgatctccgtatcctgcggagcgttgtgttatttgttcctgttaggaaaagcttatccgcatatgaaaagtaaattaagaaaaggacgtttgctatgaaggtattgtggatgacaagtgtatatccgagcagtgagaagccgggagaaggcgtttttcatgagacgcaggcccaagaactgagaaagcttggcgcggagatgactgtcatttgtccccggccgaaactcgccgcgccattccgggtgctgaaaaagacgtatcggcaaaaggatataaggccggcgcatgaatggcggaaaggcgtgtccgtccaccggccgttttatcaggcggttcccgggcagctgaaatgggcgcagccgcataaaagaatggcgtcatcggttctttccgaaattaaaaatcatggcctgaagcccgatctgattcacgcgcatttcgccatgccgtcaggcggagcggccgccattgtgtcaaaggctttaggcatcccgtatgtgctgaccttgcatggcagtgatgtcaatgtctatccgcattacagcaaaagcgctcatcgcgcatttacatttgcggtgcgggaagcagccgatatttacgctgtgagcggcagtctgcgggaacaaatgaaaaagctcatcgaagcggagtgcagcgtgcttccgatcggcatcacgcttgacgccttccgaaaaaggaacgagacgaaagaagccgtcagaaaacggctcggccttcctccggataaaaaactgatcgtgttcatcggcaggcttgtcaaagagaaaggtgttttcgacttatcaaaagccgttcagtcattggatgaaagatatgaagctgtctttgtcggtgacggtccagccgcatcttcattgcgtgaagccgctcatatcgtcacggggcaagtgccgaacgacaaggtacaggactatctgctggcctcggatgtaatggcgctgccgtcctacagcgaaggcatgccgactgtggtcattgaggcgctcgctctgaaggtgccggtgatctgtaccgatgtcggaggattggcttctttatttgggaaatatagaggtttgctgatcaagccgggttcacctggcacgctggcagaatccattctgcaatatgacgaaggagaggcttggacgccgcaaacagccgaggaactttatcaaaccgtccgcacgtattttgacgcaagccaaaacgcgaaagcgctgaaagagaaataccggtccgtcatgaaccggtccgggcaagaggagaacctttcgaaagagggatgaagctgtgaaaaaaatcgctgtattaggaacagggtatgtaggtcttgtatctggaacttgttttgcggaaatcggccatcatgtgacttgctgtgacatcaatgaagcgaaaatcagaagcttgcaaaacggagtcatcccgatatatgaaccggggcttgaggaattagccgaaaaaaatgtcagtgacgggcggttatcctttacggccgatattgagccggctgtgaaagccgctgatatcatctatatcgccgtcggtacgccgatgtcaaagacgggtgaagccgatctgacctacattaaggcagcggcgcaaacaatcggagaacagctgaacggatacaaaatcattgtcaccaaaagcactgttccggtcgggacgggaaagctcgtttaccaaatcgtcagcgaagcgtcaaagggaacatatccgtttgatgtcgcgtcaaatcctgaattcctccgcgaaggttcggcggtgcgggatacgatgcagatggagcgggcggttatcggcgccacaagcgaacatgccgcttcggtcattgaagagcttcataagccgttccgtacgaagatcgtaaagaccaatcttgaaagcgcggaaatgattaagtatgccgcaaatgcttttttagccgccaaaatatcttttattaacgatatcgccaatatttgcgaacgtgtcggggcggacatttctcacgtgtcagaaggcgtcggtcttgacagccggatcgggaataaatttctgcaggcgggcatcggattcggcggatcctgctttccgaaggatacaatggctttattgcatatcgcaaacgccgccggctatccgtttgaaatgatggaagccgtcattgaaaccaatcagaagcaaagggtccgtattacggaaaaattgaaccgcgccatcggtcccttaaaagggaaaaccgtggccgtactggggctggcctttaaaccgcatacaaatgacgtccgctccgccccggctcttgatatcatcacaagtcttaaagagcagggcgctcacgtgaaagcgtatgatccgatcgcgattcccgaagcggcagcgatattaggagaaggcggcattgaatatcacgcagagatgtacagtgccatcaaaaacgcggacgcatgcctgattacaacagattggccggaagtcaaggagatggatcttcagagagtgaagcggctgctcaaacagccggtcatcattgacggcagaaatatgtttccgttggagtatatgagggtttcaggattcacttatcattccgtcggacgtccggcggttcatgccgatcggcaaataaaagaactggcaagatagaaaaagatttgtcttcaggctctcggcagcccggctcggctgccggttttggaaaggggtttgccatgtgagtatcaaacgttcagcggcacatgttcttgtgctgcttgccgctgtcattacaggaggattcatcatgctggaggcggtcagggcggatgccggcctcggaaaaatcaccgtgctgctgcttgccgccatgatcggtattgccggacttgctttgctatccgcctttacaacaaacggtcagatgtttatggggctcatttatatactgatcgcgtgtacatttttaaaccaggccttctttgcggttcatctcggatttttcagcttatttatataccggctgttattaatcggagcgggcgccctacacatcgccggcatcctgacaaaccgtcatcatattgacagatggaatcgggtgaatgtaaaaggggttctgatgtttttcgccttatggtttacatacggtctcctatcgttattgtgggcaaaatccgtgacgtacgggattaaatatttagctttaataggaatgggcatgtttttgatttatcttattgtcatgttcattcagcgctttgatcagctgatggttttttacggcatatggcttgtgatgaccatttttgtgatggcgatcggcttttacaaccattttacacacaaccatctgccgagctccacgctttataacggcccgcagtacaaacagcattatccgacgtccgttttctttaatcaaaatgatttcgcgacgtttttgtgcatcagtttctttctgtatgcggcggcggtgaaaaatatgaaaaacggctatgtgaaggccgtcagcctgctcttagcgatctgcgctttgtatttaatcattttgaccggttcgcgcgcgagtctgctgggcatatgcgcgggggcggctgtatacgtcttcatcctgctgccttctctgttgaaaaaattcgcgctgtacgctgcgggagcgggtgctgcgctgtttgcggttttatttgcgggccgtatcaccaatgccgtcttgaatctgttttcagctccgcaggcgatgccgggacagcagccgcttccttccaacctcgccagggcgaatcttttaaagaacgcctttcactatgtaattgattcctgggggtccggagtgggtgccggaaacgtctcttactatttaaaagcggagcccgtttatgatacgggcggcgtagttgaggtgcacaactggctcgtcgagattatggcgaacttcggcgtacttacgatgctcggttacctgacagtctatttgttccttttttggacactttataaatgtcatgaaagaaaatcggaaaatcagtcaagactgatcacagaaggacttatcacggcgatggccggttttttggtaagcagcatcagcccaagctccgtatcgaatttatttttccactgggtatttctctcgctcgtgatcgcggcggtcaatatattgaggcgtttacaaaaggagcctgccgtcacggcgtactatgaaaaacagggagatgcgagatgaaggatatgttgacaagaataacccggcgtatcaaaaagaatatcatttggatcattgcgctgcccgttgtgttaggggcggcgggatatgtattgccgtcaaaaatcagcggaaacagcagttttacatcagaagccgcgatcgccgcgggaaattatgatcatccgctttataacaatacaaaagaaatcccgctccttttgacgagcgatgcctttttaaagcaggctctgcctcataaaacagacgaagaaagagcggccgtgaaaagtaaactgactgtcgaaacacaatcagattcattgatcacggtcagctgcagcggccaaaacaaacaggaaaccgaatcggtgtttcaagccgtcataacaacttttctgaagaatgatcaggacctgtttgaaaaacgggcaaaagtagtgcggcagagtattgctgcgcttgaaggagaaaccgtcagcgcggacgccaaagtggataaggaacgatttttatacgaattgaaaaatacgcagctgaacctgaaagcggccggcgtcatcaattcagagccgatgaatgaaacggctggtcaaggcatgccgccgaaaaagaaagcggttctgggcgttttaatcggcattgcagttgcctttatgttcattgtcattcctgagttttttagagagtccttgtaaaaatctgcgatggagatgtgaccatgacaaactggaaacctttcgtatctgtcattacaccgtcttataacgcaagtgaatatatcgaagacacgattcagtccgttttacaccaaagccacccgcattgggaaatgattatcgcggatgattgttcaacggacggaacgagagatattttacggcaatatgaacaaaaagatgagcggatccgcgtcgtttatttagataaaaacgggggagccgcagctgccagaaatacagcccttaaacatgccaagggccgttatgtcgcatttctggacagcgatgacagatggaaaaaggaaaagcttcaaaaacagcttgcgtttatggcagagcggtcctgcgctttttcatttacgggctacagcgtcatggagcaggacggaacgccgacggacaaaacgattcaagcccctgaaagcctgtcatatgatgaagctttaaaaaacacgattatcggatgtttaacggtcatgattgacagagagcagacggggcagattcaaatgcctgatatcagaacgcggcaggatttagcgacatggctttccctgctgaaaaggggatttacggcttacggcctgaatgagtgcctttcagaatacaggcttgtgcagaattcgatttcaagcaacaagtggaaagccgcaaaaaaaacgtggtttgtttatagagaaattgagcgcctgcattttatcaaggcttcgtggtgttttatgcaatatgcgaaaaacgcggtcttgaaaagactgtaggcgtcagaggagctgggtgatgaaggtggaaccgattattcacgtaatcgtcggagcggcggaatgggggcatgaccggctgagatacagacggcatcggctggctgaatttcttgcccggcaaaaagaaacgaaaagcgtcatttgggtatgcccgtccccgcgagccaatgatgatcagatggccgggatcgccgagggaatccggcagttcactgtaaaggatctcatgcagcaaaaagcattccgtttcggcaggtatacagacatgtgttacaggcataaactttcaccattgttgcacatgctgaaggaagaaggagaaggggcccgctgctgcttatggtacaccttccccggtttcccgcttctggcagatctgtttccttgggatgaagtgatttacgattgcagtgatctgtgggccgctccgatcagcggccgggccggtgtgctgtcaaatgtaagaagaaacatcattaaacaggcggaaatgagaatcattcagcgtgccgattccatcacctgcacatctgactgtctgcaccgggaggtcggaaaaaagctggagaacccgcaccagaaagtgttcaccattgaaaacggagtggaatatgacctgttttcacgggaaaataaacagccggatgaagacattttacggggacgaaacggaacggttctcggttttatcggcggaatcaaaccaaagctcgattttgcgcttatggcggaaacggcagatttgcggcctgactggacgattttattggtgggcccgaacacggctcaggacgatccggatttcgagtcgcttctggaacgcccgaatgtcatctggacgggacctgccgcgccgaatgaagtgccgtcctatatgcagcttgtcgacatcggcatcatgccgtataaaaattcaccttataatgacgcggtatttccgcttaagctttttgaatttttagccgccgggaaaccggttgtcggctgcaacctttcttctacgtcaaaaatcaaaaggccttacgtttatgaatacgttgaagggagcgaccccgcagatttcatcgcggcctgcgaagcgcttctggcagcggaccgccgcggatcatacgaggctttgcgccgtgaattggcccggggacgggattggaatgttttattcggccgaatgcttgaatgcacgggtatattggaaaatgcgcaatcccattaaaagggaaagcgcattttttgatttgcgtgtttctttttgatgatgcttgttataataactagtaagaattataatggaaggaacggttcaatatcagaaaagacttcatataattccaaaggagacttctttatgcttgacgaacgcatgtttcgcatagttgttgcgttttttgtctctctgctaacggttttaatcctaactcctatcgtaaaaaaaattgcgatcaaaataggtgcagttgaccagcccagcaaccgaaaagtacatgataaaataatgccccgtatgggcggcttggccatctttatcggcgtagcggcgggtgtgctcgcggccggcatatataatgaaacgaaaatgaccgccattacggtgggtgcgtttattattgttattttaggaatccttgatgataaataccaattaagcgcaaaggtaaagtttttcgtccagctggccgtggccattatgattgtgagcacgggactgaaaatggactttttctccgtaccgtttttaacggaacgtttagaattgggatgggtcgcttacccgctgactgtgttatggatcgtcggtattacgaatgcgatgaacctgattgacggtttggacggactcgctgccggcctgtcggtcatcggactctccactatcgccgttatggcgttgtccggagggaaaatccttattctgtcactttcacttgtcgtgataggaagcacactcggatttttattttataattttcacccggcaaagatatttatgggagataccggatcgctctttctcggatacgtcatctcagtactctcattattaggtctttataaaagtgttactttattcagtatcatcattccgatcatcattttgggcgtgccgatttttgatacgacattcgccgtcatcaggcggattttaaacaaacagccgatctcagcgcctgataagtcacatatacaccaccggctgatggccttcgggctgtcacaccgcacggctgtcattatcatttatttaatcggctttattttcagcgtcagtgccatcctgctgaaaagcgcgaccatttggctttcgctgtttattatttttgtattgattgtatttatgcaaatcatagcagaggtcacagggttagtaaatgaacaatttaaaccatttaccaagttttacaaaagattggtaaagaaaaattaaaaagagcagatcatgcgaatggtctgcttttttgctattctcttattatatagaaaaacccgatcctgctcaaaggatcgggtttactcttaatagcctgttgtgccgccggactgtgtgctgtccgtaccgtttgcacctgcagtaccgttggttgaatcggttgtgccgcttgttcctgtgctgccggaagtcgaatcagccgtaccgcctgttcctgtgctgccggaagttgaatcagtcgtactgtccgttccggtgctgtcagaagcgggatcggatgccgtgctgtttccggacgggtaatccaggtgcttctgcaattcctgccgtactttctcgagattggttggatccggctggaaataatatgttccgcgcgtagttgcggttccgcctaaatataaatctgatcctgttatggtcagtgtatcaatctttttgctggtaaatccgctgtaaatctgctgaagagcgagtccttcagtgattcggatattcgtttggacattattgctcgctgtttcagcgattttatcgattttagcaatatttccagctctggacatttggtcgatcagtgcgtttaaaatttgcttttggcggtcattccggccgaagtctccgcgcttatcctgctttctcatccgcgcgtaagccaaagcctgctcaccgttcaaatgcatgtttcctttcttgaaatagatccgtttctttttactgacgtcactcatctcgtcgaagtcaaacggcacttttacatcgaccccgcctacttcatcaataacatccttaaagccattgaagtcgacagtgacatacttatcaatcggtatgcctaataagtcttcgacggttgagacggtttcatccgctccgcccttagcaaaagccgcattgatttttgttttgttgccggttgtgtcgccggcaagcgtcacccgcgtatcacgcggaatactcagcattttcattgttttatttctcggatcaagggtaacgacaataagagaatctgatcgtccgccttttccgctggtggcataattttcgatccccataaacaaaatggagaacggttttttcttcatattgatgactttatcccgcaattttgatttttctccgcgggaaagggcatcatatgcattatctgccgcattgatcgttttgtatactttgtatccgccaaatccggcagcaactaacaaaacgagggtaagcagcagcaaaatccgtttgaatatgatctttcgtttgcttttctttttctttcgaacacgcactcttacacgttcagccattacattagtctcctttagggctgacgtctgtttctaaatacgtcagttctccctctgtattcttactcttgccgttcgtcagttctgtcatccattttagaaacgcttctttgtctttttcttcaacgtacgtttcaaattcgacatgatccgcataatggatatctttcagtaaaaaaactgattctctcagttcgttctctatcttgccgagccacgtataatccgctgatgtatgcataatccgcatcagcttccgctccgtaactcctatatgatttaagccttcagacactgacttcccatatgcacgaatcaatccgcctgcaccgagctttattccgccgaaataccgggtaaccaccgcgcaggtatctttcagaccgcgttttttcagcacttccagcatggggacgccggctgtgccgcttggttctccgtcatcattggccttttgtatatggtcggtttcgccgatcagataagctgagcagttatgagtcgcattccagtgctgtttttttatcttttgtataaattcctgcgcttcctcttcagaagcagcacggctcaggtgacagataaaacgtgatttttcaatcacaatctcatgttcacccgtttctttaacagttaaatagctgtgcagcatgattgctggaccctcctgacaagcattaaaagacttgtttctacaaattcgaacagactttagaatttttgcgcatattttggtatcatgaaagagtaagatactatataaaaatgtttttttctagaatatacgcattctttcattataattcgacataaattgcagttcaattacatttataataaaaatacataacaacaccgttacggagggagacagatgaataaatcgaagatggactccaaagttttggattctatacttatgaaaatgctgaaaaccgtggacgggagcaaggacgaggtttttcaaatcggagagcagtcgcgccagcaatatgagcagctggttgaagaactcaaacagatcaaacagcaggtgtacgaagtcattgagctgggggacaaacttgaagttcatacgcggcacgcacgaaaccgcttgtctgaagtaagcagaaatttccataagttcagcgaagaagaaattcgcaacgcctatgaaaaggcgcacaaacttcaagtggaactgacgatgatccagcagcgtgaaaagcagctgctggagcgcagagatgatttagaacgccggcttttggggcttcaggaaatcattgaacggtcagaatcattggtcagccaaataaccgtcgttctgaattacctgaatcaagaccttcgccaagtagggcttcttcttgccgatgcgcaggctaaacaagatttcggcttaagaatcattgaagcccaagaggaagaaagaaaaagagtttccagagaaattcatgacggtcccgcgcagatgctggcaaatgtcatgatgagatcggaattaattgaacggatcttccgcgaccgcggcacggaggacggatttcaggaaatcaaaaatcttcggcagaatgtgcggaatgccctttacgaagtcagaaggattatatatgatttaagaccgatggcattggacgatctcgggctgattcctacactgagaaaatatctttatacaactgaagaatacaacggaaaggtgaaaatacattttcagtgtatcggagacacggagaacaaaaggcttgccccgcaatttgaagtggcgcttttccgtctcgctcaggaagccgtcacaaatgcactcaaacattcagaatcagaggaaataacagtaaaagtggaagtaaccgctgattttgtcgttcttatcattaaggacaacggaaaaggctttgatattaaggatgctaaacaaaagaaaaacaagtcatttggcttgctgggaatgaaagaaagagtagatctgcttgaaggaacgataacgatagactctaaaataggtcttgggacatttatcatgattaaggttccgttatctctcggcctataatttgttaaatagagccaaaagacatattgaccgaacagcggcgtatatagaacaataggataaggaggcgtagcgtgtgactaaagtaaatattgttattatcgacgaccatcaactattccgtgagggtgtaaaaagaatattggattttgaacctacctttgaagtggtagcagaaggtgacgatggagatgaggcggctcgaatcgtcgagcattatcatcccgatgttgtcataatggacatcaatatgccgaatgtaaatggagtagaggctactaaacagcttgttgagctgtaccctgaatctaaggtgattatcctctccatccatgatgatgaaaactatgtgactcatgctttaaaaacaggtgcaagaggctatctcctgaaagagatggacgcagatactttaatcgaagcagtgaaagtggtagccgagggcggttcttaccttcacccgaaagtaacccacaatcttgtcaacgaattccgccgtcttgcgacaagcggagtttctgctcatcctcagcatgaggtttatccggaaatccggagaccattacatatattaacgagacgggaatgtgaagtgctgcaaatgcttgcagacggaaaaagcaaccgcggaatcggtgaatcattgtttatcagtgagaaaacagtgaaaaaccacgtgagtaatattttgcagaaaatgaacgttaatgaccggacacaagccgttgtcgtagccattaaaaacggctgggtagagatgcgttagtcatgtatgagaagacttgccataataggcaagtctttttttacagcttcatatctattaaaatacttattaagtacttaataaggcaggtaaagtgatgaagattgcagttgtaacagacagtacagcatatattccgaaagagatgagagaagaacatcatattcatatgattcctcttcaagtggttttcggtgaaaaaacattccgcgaagaaacagaactcgactggagaagtttttataaagaagtaaaaaatcatgatgagctgccgactacgtcccagccttctttcggtgaattaatcgcattgtacgaagaactgggcaaaacatatgacgcagtcataagcatacatttgtccagcggaatcagcggaacttataacagcgccgcctcggcaaacactatggttgatcatattaaagtttatccctttgattcagagatcagctgtttggcgcaaggtttttatgcattaaaggcagcacagctcattaaagacggtgttgactcaccggaagagattattaaagagctggaagaaatgaaaaaaacagtccgtgcgtattttatggtggatgatttatcacacctccagcggggcgggcgtctaagcagtgctcaggcttttatcggcggtctgttaaaggtaaagcctattcttcattttgacaataagataattgttccttttgaaaagattcggacacgcaaaaaagcgatttcgagaatttttgaactgtttggggaggatgcaagtaaaggaatcccgatgcgggccgctgtcatccatgcaaacagggaagaagaagcggcggatattatacaggagttaagcggtaaatatcctcatgtcgaattctataacagctatttcggtgccgtgatcggaacccatttgggcgaaggcgccatcggaatcggctggtgctttaaaaactaagtgaaaatctccgttttcaagggcggagatttttttattattaaattttcgtgattcgacaaaaaaattcccggcaggcatactttgaacagaaaggaggcagggagatgtccgaaggtgcttcagaattttcagaggtgcgggatttcttttacggccggcatttattgagatctgagataccgttttcagatcagcgcatcaaccgttttatagaaaaagagcatataacggccgagccgtcaatcatccgccggaaaaaccgttacgtctgccaacgatgcggtcagtctgatcaagcctgctttgcggcattttgggcgccctctgccaaaaggcagattacctattgccgtgcctgtgtcatgatgggaagggctgatgaactgacatcattatattcttggaatcaagcccctgaaaacagctgggagcctgtaaagctttcttgggaaggaacactgacagacggacagaagcaggccgccgccgcgcttacagatgcgataaaagagagacaagagctgttagtatgggcggtttgcggatcggggaaaacagagatgctgtttcctggtatcgagtttgccctgaatcaaggtttgcgcgtctgtgtcgcgactccgcgtacagatgtcgtacttgaactgctgccgagactgaaaaaagcatttgagaaagtcgacgtttctgctttgtacggcggcagcgaggacaaaggccgcttgactccgctgatgatttcaaccgctcaccagctgatgcgctaccgagacatttttgatgtcatgataatagatgaagtagatgcgtttcctttttcagccgatgagacattaagattcgctgttgataaagcgaggaagaaaaacagcgcccttgtttatgtaacggcaactccttcagacacattaaaaaagaatgctgaagccggtttgctgaaaagcgttcgcataccggccagatatcatcggaaacccctgccggagccgcgttttttgtggtgcggcaattggaagaagaagcttcagaaaggaaaactgccgcgctctgtaacggattgggtccgccaaaaacttcaatcacagctgccggttttcttattcgttccgtctgtacacgtattgaaaaagacaacggattattttcagaaattaaacatacgggcagaaggcgtacatgcggaagacacattcagaaaggataaagtgaaacgattcagagacggccggcttgatctgctggtaacgactacgattttagaaagaggggttaccgtgcccaaagttcagacatgtgtcctcggcgcagaagcacctatctttactgagagcgcgctcgtacagatcgcgggcagaacgggaaggcattataaacatttcagcggtgatgtcgtcctgtttcatttcggaatgacaaacggaatgaaaaaagcaaaaaaacatatagaacttatgaacaaattggcacaaaaaagtaaattgttggactagttaatttcagaaaacatgatacagtatactcatactttcctatgaggagctgtcagcatgcttgtcaattctaaagaaatcatattaaaggaacttctcgaccgccatatgcctaagcttcatatgaaatgcacatgccgggtatgcaaaaatgatgtactggcactttcattaaaccgggctgagccggcatatgttacagataaaaagaaagttgcttatgcaaaagcagagatagttgataaacagaaaaatacggcgctgcttgtcattctggctgaatcagccgcgattgtttcggttaatccaagcgagttctgtgaaacttgggaaggagcgtaatatctctgaattgtttattgtgtgactcaccaatttcaagttcattgacttggagatctttgttttctctggcgcccgagcaagaggtatgcaccatatgcagcagccgattcgaaaaaattgaaggccccgtatgcagtatatgcgggaggcctcaggagtcaaatgaaaaatgcgctgattgtgcggcccgggaatcaaaaacggaaaagcgctttttgctgcggcaaaaccgttcggtatatttgtataatgatgcgatgaaggactcattagcccggtttaaattcaggggtgatgcgaaaatcattcaagcatttggacgtgactttgctgccggctttaaagcggcatatccatcaaatacacatactctcatccctattccgctgagcggcgaacggctggcggaacgcggattcaatcaatccgagctgctggcctctctgctcggaatgcccgtcattttccccctcatccgactgaacaatgaaaaacaatccaaaaagagcaaaacagaaaggctgtccgcagaaaaaaagttttcagcagccgaaaactcggccgaaggtatgaacgtcatcttaatagacgatatttatacgacgggcgccacactgcatcaagccgccgaagtcctgctgacagcgggtaaagcgtcatcggtctcctcttttactttaatcaggagctaaatcattctttttttctgccgatataattgatagaaatataaggcagattaaagaaggaataggagttaatacgatgggtgaattggcgaattgtccaaaatgcaatgctttattttttaaaacgaacctgcagaccgtgtgccaggcatgtattaaagaagaagaaaaagcatttgaaaccgtctataattttttgagaaagcagatcaacagacagtcgacgatgcagcagatcactgaggaaacaggtgtggatgaagagctgatcctcaagtttatcaaacaaaaaaggattcagatcagccagcttccgaatttggcatatccttgcgaaaggtgcggaaatccgatcaggacaggaaaattttgcaagtcctgtcagacagatattgagtcgcaattagaccatatgaaccaaaaaacagccgctgaattcaaagaaaaaaacagtacaaaagacacatactatgcctataataccaaaaacacctgattccctaaactaactgataacgcagtcgataaaagaattagactgcgaacagaaagcgagaggaatcctatgaaaatcaatcagtacggaacacaatccgttaatccataccaaaaaaattacgaaaagcaagccgtacaaaaagaggctgcaaagccgaaggacaaagtggaaatttcttctcatgcaaaagagcttcaaaatgcgtcagatgcggtcactaaaacacgtcaggaaaaaatcgctcagcttaaagcggatatagagagcggaacatataaaatagattcaaacagcatcgctgaaaacatagtgaatttttataaaaagcaataaaaaggagaaagtcaatgtctgcaaagccaattattgatcaactgaagcgactttgcgcactgcatgaacatctgctcacgctgtctgaggagaaaacggaagcgctgaaagcaggtaaaacaaaagagctctccaacatattgactaaagagcaaaagtatattcaggcaatcgggcagactgaggaagaacgaatcaggttaacttctcagtttctcagccgcggtgaggacaatacaattgctgcatgcatctccagaacttcaggcagtgaaaaacaggagcttgaagggttatttcactctctgtctgcgcttcttgaccgtctgaaagaagtgaatgagatgaacaaacagctcacgattcaggctttacaattcatctccggggcattcgatatgatcatgccgggtgaaaaagagaatatgaattataaagagccgcaagcggcgcgcaagcctgtcagccgtttgacattattcgattcaaaagcttagaacggaggattttcaatgccatcgacttttatggggctcgaaacagcaaggcgtgcattgagtgcgcagcagactgcattgagcacagtttcaaataacgttgcaaatgcaaatacagaaggatatacgaggcagcgcgtcacattacaatcgacgagcccttatcccgcagtatcaaaaaacagtgatctgacggccggccaaatcggaacaggagtaaaagccggttcagttgagcgcgtcagagacagttttttagactatcagtacagaacggaaaatacaaaattagggtactatacagcccgttccaattcattgtcgcaaatggaaggcgtcatgaaagagcttgacaataacggattaaacggatcgctcagttcattttggaatgcccttcaggatctggcgacgaatccggaaaatacgggagcgcgctcagttttgcaggagcaggggaaatctcttgccgaaagttttaactatatatctacctctttgactaacattcagggtgatattaaaaagaacctggataacacagctgatcaggtcaattccattctcaatcagctgaatgaccttaacaatcaaatagcggcagttgagccgagcggtatgctccctaatgatttgtatgaccaaagagacagattgattgatcaattatcttctatggcaaatataaaagtttcatataataagtcgggcggacatgccttggcgactgctgagggcacggttaacgtcgaattgctgaacgggaacaacaattctctcggaacgctgctcgacggtaacacaaaaacagtttcagaaatgaaaatcaactacgacaaggacagcggactcgtgtcgagtgtgtcagtcggcagcagtacggtcaatgcggatgcatttaccggaaaaggctcacttttaggtcttattgaatcatacggctatatgtcaaacggagaagaaaaagggctttatcctgaaatgctgacggctcttgacaatatggcgctatcctttgctgacgcgtttaatgcagttcatgaaaaagggaagacctatacaggcgaacagggtgcagcattttttgatttcagcggtgatgaagcggtgccggcaaaaggtgcggcagcgaaaataaaagtcagtgacaaaatccttgcgtctactgataatatcgcagcgtcgttaaacggagaaaaaagtgacggcacaaacgcgacaaatcttgcagccgtacagaacagcaagctgactattaacggtgaaaccactacaattaatgacttttatgaatcccttatcggaaagctgggcgttaattcacaaaaagcggctaatcttatgaacaactctgaaagcaacaccctttcagccgatgaacggagacaatcagtcagtgcagtgtctttagatgaagaaatgacaaatatgattcagtttcagcacgcttataatgcggctgcgcggatcataacgatgcaggatgaaatattcgataaaattattaacggtatgggcaccggaggaagataggagataagtaaatgagagtaactcaagggatgatcgcaaaaaattctcttcgatttatcggctcaagttatgacaagctcgatcggcttcagcagcaagtgtctacggggaaaaaaatcacgaaagcttctgatgatccggtcgtcgcaatgaagggaatgcagtaccgtactcagcttgcgcaggtaaaccagtaccaacggaatgtttcgcaaggttttacatggctggaaaactcggaatcaagcgtaaactcggaaacggatattatggggaaaatccgggacttgatggttcaggcgaaaagtgattcgaacggtgaaacagaattgaaagcaatcggtacagaaatcggccagctgaaaaagcagctcgtttctgtcgcgaatactcaggtaaacggacgttatctgtttaacggaacgaattcagatgtcccgccgatcactgaaaatgccgacggcacatatacgtacaactatgagaattataccggtgcttcggatgttaacatcaacatctcaaacggagcagtgctgaaagtgaattctgatccaaactcagctttcggaggcgtcgcacaaaatggagataatgtatttgaatttctcaactccttagaagcttctttaagcaaaggcacgctgtccgaagcagattcaaatcaaattctgtcagatatcgacggttttactgacaaaatgaatgctgaaaaatccaatatcggcgcacgcacaaaccggttggaactcattcagacaagattggaatcacaagcggcaaccgctgaaaaagtattgtcggataatgaggatgtagaaatggaagatgtaattgttgattatttatctcaacagacggttcatagagcagcgctgtcagtgaatgcgaatatcattcagccgtcactgatcgacttcctgaaataatataactatcgtcttcaatatataaaaaaagcgactcacaacagggagatcgctttttttactaaaatactataaacaggagggatctctgtgcagatgccgagattgattattgacagtgtgcctgctaaaatcggtataacctttcaaaaggaagaaatcgagatggaacagccgcccgctgacctggaaatcgagcagccgccggcagagctgaacatcgaaagcacgccggccaaactgacgattgaccagacgagggcgtgggagaacttgaatctcaaatcatttgaaaagctgaacgctgaagccgctcaaaaaggtgcggaagcctgcagcgagtttatcgcaaaaacagtcagggaagggaaggaaatggcggctatcgaaaagaaaacgggcaatgtgatggcccggcaggcagcagatgtcagtccgcccgatccattcggcgaattcagcgactttctgcctgcgcagtttctcgtcgacattgactgcattccttcaaagcttacgattgatattgaagcccgcaaaccttcaattgaagcagctgtcaataaacctgtatggaattatacgccggggaaagttcagattgatatgatgcaagaccctaaggtgacgatttcggttgatgatggcaacgcagaataaaagatgaaagtggtaaaggattgtgaaggatgataattaaaacaaaatatcacggagaaatcagaatagatgaagggcagattatctcatttgaaaacggcctgccgggatttaatgacgagactcaatttgttgttcttcctttgtcggaagattcaccgtttttggcgctgcagtctgtgaaacaggagcacatcgcctttattgtcgccagtccgtttattttctttaaagggtacgaatttgacattgaccaagcgacgcttgagcttttgcatattgaagatatagaggacgtcgaagtgatggcgattttaacgctggaagagccttttgaaaacacgaccgccaatttaaaagcgccgattatcgtcaataaaaaggaaatgaaggcgaaacaaatcattttacatgatgcttcctatgaaacaaaacatctgataggaggaggatcatgctagttctctcaagaaaagtgaatgagtccattcagatcgggccggatattgaaataaaggtgatcgctatcgaaggagaacaagtgaagctgggaattgaagcgcctcagcacgtagatattcaccggaaagaaatctacttgtcgatcctggaagagaacaacagagccgtatcttttaatactgatttattacttaacttatcctcacaaaaaaagtgaggatttttttattttcaatataaacaatggaagcggccgtccgatatatatattgtagccaatgagaggaaaaattttcttcagaaatgacgctgcgcaaatgcacaaggacgtgcgaaaaacaattcagggaggaaatacaaaatgagaatcaaccacaatatcgcggctcttaacactagccgtcagctgaatgcaggttcaaactctgctgcaaaaaacatggaaaaattatcttcaggtcttcgcatcaaccgcgctggtgatgacgctgcgggtcttgcgatctctgaaaaaatgcgttctcaaatccgcggtttagacatggcgtctaaaaacgctcaagacggaatctctcttatccaaacatctgagggtgcattgaacgaaactcacagcattcttcagcgtatgagcgagcttgctacacaagcagctaacgatacaaacacagattctgaccgttctgagcttcaaaaagagatggaccaattagcgtctgaagtaacaagaatctctactgacactgagttcaacacgaagaaacttcttgacggaactgcgcaaaacctgacgttccaaatcggagctaacgaaggccaaacaatgagcctgtctatcaataaaatggactctgaaagcctgaaagttggtacgacttatacagtatccaatgatcaaaatacattgacatcaactgacggaaaaagcactgctacttgggcggatgaagtaacagatccagatggtaaggttacaaaagcagccggctattatgatactgacggtaaagttattgcatctgaaaaattagctgcagattctaaagtaacaaaaggtatcgacatctcttcttcagctaaagctgcgtcttcagctcttacaacaatcaaaacagctatcgacacagtatctagcgagcgcgctaaacttggtgcggttcaaaaccgtttagagcacacaatcaacaaccttggtacttcttctgagaacctgacttctgctgaatcacgtatccgtgacgtagacatggcttctgagatgatggagtacacgaaaaacaacatccttactcaggcttctcaagctatgcttgcgcaagctaaccaacagcctcagcaagttcttcaattgcttaaaggttaatgacggaaagatcctggttctccagggtcttttttttatttcttcagctaactcctccttcagcaagccaaagaaccctattgacaaaatgaaacattatattttgcagttaaattattgaaaaccttttaatatgaccgatataagaataagatcatacatttatggagctgtgatatgataaacagtcggaaactcactgttgtcatagagccgtctacgactaaacgccgaaaaggagagggtacatatggtcacaagaatcacaggccttaattccggtcttgatgtagattctctggtgaaaaaaatgatggatgccgaaaagcagccgcttaataaattaaaccagcaaaagcagacgcttgaatggaagcgcgatgcttatcgggaaatgaatacccagattgccgacatgtattctactacatttaataatatgctgatgtccacaaactggaataaaaaaacagtaacaagttcggattccagtgtcagcgcggtggccgtcagtgccgaacagaatatttcaacgagcatgtctgtacagcagctggctacgccgacgacttataaatcatcaggggccatcaatttcacttcgggtcaaagccaaacattgaaattcaatgtcacaaatccgggggaaacgaagccgactgaggtaaacgtcacgatcgccgcaaccgatacgattgacgatgtcatttctaaactgaacagctcgggtctcggagtgacggctttaaaagagaaaatctctaacggctcggattatgtggacacgattgcgttcacttccaataaaacgggggaagggtttaccctttcagcaggtgatgacgcgaccaaaagctttctgaaagatcagctcggttttgccgttgatgatgcaacaaatgcactgacggccaatgccgaagggaaaaacgcgaagtttacgttcaacgggcttgaaatgacaaaaacgtcaaataactttacgatcaacggcatcaaatacacgctgaacagcgtgacggacagcaacaaaacggttacgattaacagcacgactgatacggacggcatttttaacaacattaaagatttcgttgataaatacaatacgttaattaaaagcgcaaatgagaaggtgacagaatcaaaataccgtgattataagccgctaaccgatgaacaaagagaagcaatgaccgataagcagattgagcagtgggaggcaaaagccaaaagcggtttattacggagcgacagcacgctgcagaacggtttggcggagatgcggcttgatctgtactcaacggttacgattgacgggaaaaaatatcagcttgccgatttcggaattgagacgtctgatagttatacggatcaaggaaagcttgtcattaaagacgaagcgaaactgaaacagaaaattaccgagaatcctgctctcgtggctaaactgtttaatgcagacagccctgatacagcgaaaaccaaaaacccggaggaacaggggattgcccggagattaaaagacacattaaacaaaatgcagattcaaatttcaaaacaggcgggtacggaaagctcggtatcaaccagctttgccatcggaaaaagcctggatgaaatagaaacaaatatttccaatatgaaaacgaagctggatgacatcgagacgagatattataaaaagttcagcgcactggatacggcattggagaaattgaacagccaatcttcatatctcacgtcaatgttaggatcttcaacttcataaccttgggggttttataaaaatggcaataaataatccttttgctgcttaccagcagacatccgtctttacagccgctccggaagagctgacccttatgctttataacggctgcctgcgattcattaagctggcaaggcaggcgatgaagcaaaacaaccttgaagccaaaaatgaaaatatcgtaaaggcgcaaaacatcattcaagagctcagcatcacgttaaaccgggagattgagatttccgagcagatgtcatccatttatgattacatccgccgccggctgatcgacgcgaacgtgcagaataacggagagtttttagatgaagcggaaaagctcgttactgaatttcgcgacacgtggaagcaggccatgcagagtgaacggaaaaacagccatggcgcgggcggccttgcctgatgaacagcaatgtcttttctttgtataacgaaacgaagaacatgtacgccgcactgaaggacgccccggaaagcgacggtctcatcagcagcgttacggcatttacggagaaaagggaggagatgcttgcgggcataaagccgcctttttccgaagaagaaaaaacgctgcttcagcaggtggccgcgatggaccgtctgattaccggcgaagtgaaacggattcaggatggtatccgaaatgaaataaaaacgcttaagaaaaaacgaatctaccataatacgtatttcaatccgtatcagcaaacgacaagtgacggccgttattacgacaaacgcaaataggtgagtgttttgagaagtttgaacgattaccatttggtgtcagcctattaccagcttctttttacgattgatgaggggctttgctacctgttggacacgcaggatgatttttttaagacggagggcgagcggatttacaacgatttgattcaggctttttttcatctcgattcctctcatgcgcttctgctgtctatcattgagtgccgatgcgtggagacggcgatccgctcatttgacgagatctttcaggatttcagcatgttaaatgattatgatttcccgtccgccccttttcaggagtttttaaaaaccatctttctgccgcattataagctatggatggagcagacgcacgactgtatcaaaccgtatgttcttcactagacctgctgcaagcggcaggtcttttgcctgcgtcctttgcatatacttataatcctgccggaagctgccggataaaaccgacaccattcgtcatcgttcaccgaatttacacattattttaacgtttcagcagggatcagaaggggtaaaagagaaatagttacatatccttagataaagggaggcgttctttgatgaactacaatatcagaggagaaaacattgaggttacacctgcgttaaaggatcatgtggagagaaaaatcggcaagctggaacgatatttcgagcagagcgtcaatgccgatgtgaacgtcaacttaaaattctataacgataaggaatccaaagttgaagtcaccattccgatgactgatctggcgcttcgttctgaagtgcataacgaggatatgtacaatgcaattgatctcgcaacaaacaagctggaacgtcaaatccgaaagcataaaacaaaagtcaaccgaaaattccgcgagcagggtcttccgaaacattatttcgagaacggcagcgctgctgatacgggcgtagcggttcaggacgaaattgaagatgacagcccggaaattgtccgtcaaaagcgttttaatttaaaaccgatggataatgaagaagcgattctccaaatgaatatgctcggacataatttcttcgtattcaccaacgcggagacgaatctcacaaatgtcgtttaccgcagaaatgacggcaaatacggattaattgaaccgactgaataaacccacccagccttccgtgaacgcgcggaaggtttttctctatctttatctgcaaattctttggaaatagcaaaaggtatgttatgataatgagaggtatacatggacagaaaattatcatttattccatgcaaaatctgcatgtgaacatagaggagcgttatagatgcttgggattttaaataaaatgtttgatccgaccaaacgtgcgctgaacaaatacgaaaaaatagcaaatgacattgatgccgtaagaggagattatgaaaatctttctgacgaggcgcttaaaaataaaacggcagaatttaaagagcggcttgaaaaaggagaaacgacggatgaccttcttgtcgaagcgtttgccgtcgttcgtgaagcttcccgccgcgtaaccggcatgttcccgtttaaagtgcagctgatgggggcatcgcccttcatgaggggaacatttccgaaatgaaaacaggggaagggaaaacgctgacgtctacgcttcccgtgtatttaaatgccttgacgggaaaaggcgttcacgtcgtaacggtcaacgaatatctggcaagccgtgatgcccagcaaatgggagaaatctttgcgtttctcgggcttacagtcggcctgaacctgaattcaatgtcaaaagacgaaaaacgcgaagcttacgcagccgatatcacgtattcaacgaacaatgaactcggctttgattatttgcgtgacaacatggtgctctataaagaacaaatggtgcagcgcccgcttcattttgccgttattgatgaagtcgattcaattttagtcgatgaagcgagaacgccattgattatttccggacaagctcagaagtccacaaaactgtacgtgcaggcaaatgcgtttgtccgcacgctcaagaaagatcaggattatacgtatgacgtcaaaacgaaaggcgttcagctgacggaagaaggaatgacgaaggctgaaaaaacgttcggcatcgacaacctgtttgacgtcaaaaacgtggccttgaaccaccatatcaaccaggctttaaaagcccatgcggcgatgcagaaagacgtggattatgttgttgaggacggccaggtcgtcatcgttgattccttcaccggccgtctgatgaaaggacgccgctacagcgaaggtcttcaccaggcgattgaggcgaaagagggcctggagattcaaaatgaaagtatgacattggcgacgattacgttccaaaactatttccgtatgtacgagaagctggccggtatgaccggtaccgcaaaaacggaagaggaagaattccgcaatatttataacatgcaggttgtatccatcccgaccaaccagccggtcatccgtgacgaccgtccggacttgatctaccgctcaatggaagggaaattcaaggcggtggcggaggatgtcgcccagcgctacatgaccggacagccggttcttgtcggtacggttgccgttgaaacgtctgaattgatttctaaacttctgaagaataaagggattccgcaccaggtactgaatgccaaaaaccatgagcgtgaagctcagattattgaagaagcgggacaaaaaggcgctgtcacgattgcgaccaacatggcgggacgcggaaccgacattaaactcggcgaaggcgtaaaagagcttggcggtcttgcggtcgtcggtacggaacgccacgaatcccgccggattgacaatcagctccgcggacgttcaggacgtcagggagacccgggcatcacacaattttatctttcaatggaagatgaattgatgcgccgtttcggagctgaacggacgatggcgatgcttgaccggttcggtatggatgactccacgccgattcagagcaaaatggtgtcacgcgccgtggaatcatctcaaaaacgtgtcgaaggaaacaacttcgattcacgtaaacagcttcttcaatatgacgacgtgctccgtcagcagcgcgaagtcatttacaagcagcgttttgaagtcattgactctgaaaacctgcgcgacattgtggaaggcatgatcaagtcttctctggagcgtgcgattgccgcttatacgccgaaagaggagcttccggaagaatggaatcttgacggcctcgtggagctggtgaattcaacgtatcttgatgaaggcgcgcttgaaaagagcgatatcttcggaaaagaaccggatgaaatgcatgagatgatcatggaccgcatcatgacaaaatataatgaaaaagaagagaatttcggtacagagcagatgcgtgaatttgaaaaagtcatcgtattgcgtgccgttgattcaaaatggatggatcatattgatgcgatggatcagctgcgtcaagggattcaccttcgcgcttatgcgcagacaaatccgctgcgtgaatatcaaatggaaggcttcgcaatgtttgagcacatgattgagtccattgaggacgaagttgcgaaattcgtcatgaaggccgagattgaaagcaatctggaacgcgaagaagttgttcagggccaaacgacggctcatcagccgcaggacggcgatgaggccaaacaagcgaaaaaagcgccggtccgcaaggttgtggatatcggacgcaacgcgccttgccattgcggaagcggaaaaaaatataaaaattgctgcggccggacagaatagtctcgactgtatgaagcgaacatgaccgggtctgcgtcttatggcgccccggatcttttaatgaggtgaatggaatggaattatcagaaatcagggcagagctcgaaaatatggcttctcgtttagcggacttcagggggtctctttgacctcgaatcaaaggaagcccgcattgcagaattagatgaaaagatggcggaaccggaattctggaatgaccagcagaaggcccaaaccgtcatcaacgaagcgaacggtctgaaagaatacgtgaactcctaccatcagctgagcgagtctcacgaagagctgcaaatgacacatgatcttttaaaagaagaacctgaccaggaccttcagcaagagcttgaaaaagagctgaagtcattaacgaaggaattgaatgaatttgagcttcagctgctgctcagtgaaccatatgacaaaaataacgcgattttagaacttcacccgggcgccggcggtacggaatcccaggactggggttccatgctgctcagaatgtatacccgctgggcggaaagacgcggcttcaaagttgaaacgcttgattatctcccgggagatgaagcaggaattaagtcagtcacactgcttattaaaggccacaatgcatacggctatttaaaagcggaaaaaggcgtacaccgcctcgtgcggatttctccatttgattcatcaggccgccgtcacacgtcattcgtgtcatgtgaagtcatgcctgaattcaatgaagaaatcgacattgatattcgtaccgaagatattaaagttgatacgtaccgggcgagcggtgccggcggacagcacgtcaatacgactgattcagccgttcggatcacccacctgccgacaaatgtagtcgtcacatgccagacggaacgctcccaaatcaaaaaccgcgaccgggcgatgaaaatgctcaaagcgaagctgtatcagcgcagaattgaagaacagcaggcggagcttgacgaaatccgcggcgaacagaaagaaatcggctggggcagccaaatccgctcgtacgtcttccatccgtactccatggtgaaagaccaccgcaccaatacggaaatggggaacgtgcaggcggttatggacggagatatcgatatcttcattgacgcctatttacgttctaaactgtcgtaatccgggaacacacctgcctttggcaaggtgtgtttttttatccgttctctttttccatttttcacaacagcgctttagcaaattaatacggtatttggctgttatttacttctaagccgggaagacttaaaatgctatcgagagaaaatcggagaacggaggattttgcatggatgtgaatcacaataagccgctccgtctgatcaaagattacatatatatcatgatcggcgcggcgattacgggggtcgtgtttaacgtatttttgctgccgaaccgtatagcagcggggggagtaagcgggatcagcaccattttagaaacgtttggttttgaaccggcttatgtgcagtggattattaacatccctttgtttatcgccggagtgatcattctcggcgggaagttcggaatgaagacactggtcggttccatcgttctgccgcttgccgtctttttaacaagagatctgcctgccgcgacgacccatgaactgctggcggcgattttcggaggcgtcgggatcggaacgggaatcggcatcgtgtatctcggcaaaggctccacggggggaacggctctggcggcgcagatcattcacaaatacacggggctgtcgctgggaacgtgccttgccatcatggacggattaattgtgctgagcgcgatgctcgttttcggagtggagcagggactgtatgcgatgctcggggtatttatttcaagcaaaacgattgatgtcgtgcaggtcgggttcaaccgctccaaaatggctttaatcattacgcagcatgaagaagccgtcagatcagctgtgtttaaagaaatcgacaggggtgtgacgaagatttccgcagtcggcgggtatacggaacatgaccggccgatcttaatgtgtgtcgtcggtcagaccgaattcacaaaactgaaacaaatcgtcaaacaaattgatgagtcagcctttgtcattgtcgcagacgcaagcgaggtgctcggcgagggtttcaaacgcgcgtaaacgaggttataatagcgaaggggtgcatcttacatatgaaatcaaaatgggcgctgctggcgctggttctgaccatgtccgtcctgctggcggcatgcggcggatccaatgaatcgaaaaaagaaagctctgacagctcaggcggatcaaaagcatctgcgtcagcgggtgaagaactttatcagcaaagctgtatcggctgtcacggtaaagacctagaaggcggcggaggtccgaatttacaggaagtcggcgggaagtatgatgaagctaaaattgaaagcatcattaaaaacggacgcggcaatatgccgagccatcttgtaaatgatgaggaagccgtgaagatcgcaaaatggctgtcacagaaaaaataacagaaaaaccttgcctgttataggggcaaggttttttctcggtctgggaatgaaaagaaactgtaatagtaatatgtctaaatttgacgtataatgaagtgtactgaggaaaaggaactttcagatttttcatctgtttcctgacgaatcggccataaaccgctgtatgtttgcgaactctatggctgcaagacataaataaaagattaggtgatttcatgatagagatgaaagaagtatataaatcctatccgaacggtgtaaaagcgattaacgggctgtcagtcatgattcatcccggggaatttgtatatgtcgtaggaccgagcggagccggtaaatctacttttattaaaatgatttacagagaagaaaaaccgacaaaagggcaaatattgattaatcataaagatctcgcggctgtgaaagaaaaagagattcctttcgtgcggcgtaaaataggtgttgttttccaggatttcaaactccttcctaaattgacggtatttgaaaacgtagcgtttgcgcttgaggttatcggagagcagcagtcagtcattaaaaaacgcgtgctcgaagtgctcgatcttgtgcagctgaagcataaagcgcggcagtttcccgaccagctttccggaggagaacagcagcgtgtttccatcgcaagatccatcgtcaacaatcctgacgtcgtgatagctgacgaaccgacgggcaaccttgatccggtaacatcatgggaagtgatgaagacgctggaagagattaataaccgcggaacgaccgtcgtgatggcgacacacaataaagaaatagtaaacaccatgaagaaacgggtcatcgcgatcgaagacggaattattgtgcgtgatgagtcaagaggggagtatggttcttatgattaaaattctcgggcgccatttgcgtgagagttttaaatctctcggaagaaacacgtggatgacatttgcatccatcagtgccgttaccgttacattgattttggtcggcgtgtttttagtcattatgctgaatttaaacaacatggctaaaaatgctgaaaaagaagtggaaattaaagtattaatcgatctgacgtcaaataagaaaacgcaggatacgctgcagaatgagataaaagacatttcaggaatccaaagcgtagagttttcatctaaagataaagagcttgatcaattggtcaaaagcttcggcgacagcggaaaggccatgaaaatgcaagatcaggaaaacccgctgaacaacgcgtttatcgtcaaaacgacagatccgcatgatacgccgaaagttgcgaaaaaaattgagaagcttgatcatgtgtataaagtgacatacgggaaagaagaagtcagccgtctgtttaagatcgtcggggtgtcacgcaacatcgggattgcgttaatcatcggccttctgttcacggcgatgttcttaatttcgaatacgattaaaatcacgattttcgccagaagaaaagagattgaaatcatgaagcttgtcggcgcgacaaactggtttatccgctggccgttcttcctggaagggctgctgctgggggtattcggttctgtcataccgatcgctctcgtgctgagtacgtaccagtcgatggtcgcttgggtggccccgaaagttcagggatcatttgtttcacttctgccgtacagtccgtttgtgtttcaagtatcacttgtgctcattctgatcggcgcggtgatcggagtatggggaagtctgacttccatccggaaattccttcgtgtataaataaaaaagccagtctgatacagactggctttttttaatggtttcgttactgaatgacgggcagggccggtgatccgggctttaatgtaaagtcataagacgattcgtcacggtacatcgggtccgcataaatggaatccgaatcgtttgccgttccttttcggtacgctgtgaatgaatcatattctctgttcttccaattccagatgccgtcttttccctcttctttgtgatagacgttatgattaacggtattttcttcgtttttcgtaaaatcatttgcgataaaaatccgtgaatcgcttgccgtcatgatgtttttttcgatcgtgttcccttttgtgccgtactgcaggagcagctggccgccgtcaaggtccttcgtgtcatttcggtacatgatgttgtgagcgatcaccgaattgatggtgccgccgcgtttcgtgtcatagcctccgattgaaataccggtgtatgcattgccgtacaccttgttatccgtaatccggatatctcgtgcgtatttccctttatgctcagaggtggcttcaatcccaaggtcattgttgtaaacggtgtttttcttaatgtccacatgttctgcgccgtcaacgtaaataccgcccgctgaatattcatctccgtaagcgggatttccgtaagaagagttatggctcaccgtattgttttcaatgacgccgtttcgcgcatagtcgttttgcttggacgttccttcgtatccgatcacgtcaatcccgatattgttattgtcccggatggtattgccggcaatcttaaatccgtcgacattcccgttcagcacgaccgcttcgcttgcgccgagcgtcagtttttcaaccgtattatttgtaatgctgacatccttcatggcacctgtgccgtaaaatgcgatgccgtgtgcatttccttcatcagccgtggttttaatgttccggatatggttgccgtcaatgttgatatgactgcttgatccggtgacgcagatccccatggccgtcgcatcttctgatgatacggagagattctcaagcgtaacgccgtgaatggtaatgtactgtttattgcggatttgaattaacggagtttcagaatcgctttttggcgcagatttgccgctgattgagacatgctcattctgatagttccgaaatgtaatcggcttttcggccgtgccgctgtgctttacttcaaacgtttcatcgtacgtcccttcccgaatcaatacggttgttccggcctctgccttttcagccgcatgttttaatgtgcggaacggcttttctttcgttccttcatattggtcgctgcctgcgggagaaacatacaaggcgtccgtctgcgctttctcattggcctctgtttttggccagacaaaggcggtaatgcctgcggccagaaccgccgcggataaaatcgataattttattttcatatcgcattctcctgtatatttaatgaattgcatacaaaatattatacgttacccatatatatgaaacaatctcgctttttcatttttttgttgccgttacatgaattctttgcaatttacacatactatctccaggttttcgttaaaggactaagaggaggtaaacgatgaagcagaaaatgatcgcagtgatagcggccctaagcatgatgtgcggcggagcccatattgccggggcggcacagccgaattcatcagacgcagaaagaacccgggcaatggaaaaaatcgaaaaagcatatgagctgatctcgaacgaatacgtggaaaatgtagataaagaaaagcttcttgaaggagcgattcaggggatgctgtctacattaaacgacccttattccgtttatatggacaagcagaccgctaagcagttttccgattctcttgattcttctttcgaagggatcggcgctgaagtcggtatgaaagacaataaaatcattatcgtatcaccgtttaagcaatctccggcagaaaaagcgggcctcaagccgaatgatgaaatcatcagtataaacggcgtgtcaatgaacgggaaagatataaacgaagccgtgctgaaaatcagaggaaaaaaaggatcgaaggtttctattaaaatacagcgtccgggtactgaaaaacagctgtcattccggattaaaagagcggaaatcccgcttgaaaccgtatttgcttcccgcaaagaatcaggcggtcatcatgtcggctacatcggcatatcgacattttccgagcataccgccgaggacttcgccgcggcgctgaaaaagcttgaaaaacaagggattgacggtctcgtccttgatgtaagggggaatcccggcggctaccttcaaagcgtcgaacaaattttaaagcatttcatcacaaaagacatgccgtatatccaaattgcggagcgtaacggcgataaaaaacaatatttctcaaccttaaaacataagaagccgtatcccgtcaatgtcattacggataaaggaagcgcctccgcttcagaaattcttgcgggcgcgttaaaagaagcgggacattatgacgttgtcggcgacacttctttcggtaaaggaacggttcagcaggccgtgcctatgggagacgggagcaacattaaattgacgctttacaaatggctgacaccgaagggcaattggattcacaaaaaaggcattgctccgacaatcgctgtgagccagccggattattttgcggcgggaccgcttcagctgaaacagccgcttcagcctgatatgaacagcgcggatgtcaagcacgcccaaatcctgctgaaaggcctaggcttcgacccgggcagagcggacggctatttcagcaaaacaatgaaaaaagccgttctggcgtttcaagaccggtacaagcttgataaaacagcggtcattgataaaaagacagcggaaaaaatgaatcagctgatgaatgaaaagaaatctgacgaaaaaaatgatttgcagctgcaaatggcgttaaaatcattatttgtaaaataaatgaaaaggaggcgttttttgcgtctcctgtttcttttgtcattcataaaaagtgaaccaaaagacatataattatgacggttttgacaagatattaaaaaaattttcacatttaaacatttataaaggacaaacattacccgatatttatagagaagagagactttatgccgatttaatatgtattcaaaatgaaacttttgaaagttgcctcagtcagttttagttcttacaataaaagaaggttctaatagagaacagttttagtttggcagctgcatttcagtatcgaaagcagaagtgtttgcggcgcttcagcacggcagctgtaatcacccgtgcttatctggataaaaaaatgggggttcacaattgaagagggcaagtattgtgcgtgaaaaaaaatattatgaattagtggaacaactaaaagacagaacaaaagacgtcacattttcatcaacaaaagcactaagtcttcttatgctgttcagcagatacctggtcaattacacaaatgttgaatgcgttcacgaaatcaatgaagagtgtgcgaagcattatttcacttacttaatgaaaaaccataaacgtttaggaatcaatctgacggatattaagcggtccatgcttctgatcagcggcgtgatcgaggtggaggttgaccactatctgaaagatttctctctctcaaatgtaacgttgtggatgacggaagagagatagacgtttgagatattcaagccaatgattatttggtagaatagaattaaaatgtttggcttgaggcggtgaaagcagtgtctgttcaatggggaattgaacttctgaaaagtatcggtctgttttttttgcacccgatgttctggttttttatcatcataagtctcgcatgcggatatttgcggatcaaacgtgaacgccatacgtttcatacaaagatcgcggatatgtatgacgagcttatctttacatacataaaaggacttataccgggtattcttctctccatattattttttggacttggaatttcgattccattcggtcttctcggcataatcgcggctgtgactgctttgctttcgctgacgttccgtatgaattggctgtcctcagcttatattgtcagcgccggcatgttcattgcgtttatccttcagtatacccacacagtgccgtttgcggatcggtttccgcaggcattcggcgtgaattgggcatcggcggccgtgtttatgggccttttgattatcacggagggagcggctgcctgccgttcagcgcatctgaaaacatctccggcgcttgtcgtcagcagcagaggcctgcccatcggccgacaattggcgaatcgcgcatggctgcttccgcttttcttattggtgccgggcagcgggcttgagtcacacctttcttggtggcctgtctttaccgtaccgggcggctctttccatttgatctggattccttatatcgccggcttcggacagcgtgtgcaggggtcacttccggaagtcagcataaggataacggcgaaacgtgtcatgattctcgggttatcgtgaccgcattcggggcagctgccctttggtggactccgcttgccggagctgccgcttgtattgcggtgctcggacgcctgtttttatcattgagacagcggctgaacgataacgcggctccgttttatttctctaagcgggatcagggcttaatggtgctcggcatcattccgaatacacccgcggacgatcttgagctgaagatcggtgagattattacgaaagtaaacggcatccccgtgaaacatgtatcggatttttatgaagcacttcaaaaaaaccgcgcatttgtaaaaatggagatcatcggcctgaacggtgagatccgttttgatcagcgcgcgtcctatgaaggcgaacatcatgaattaggtattttattcgtgcaggatgaacacgagcacgaagaaatgacagcattataatgtgatttttcataattattcggaatagtttcaagaactcctaaactagatttcaaaatcagttagaaagtaaaacagctaagaaaattatattttcttagctgttttattttgaaataataaaaaaataaatgaaggagaggtatggcttattggaaaggttattgctaactccaaaacctttagaagatgaatctttagcaggatatatattaagaataactgattataatggttatgttggatagggggagtacattataaaaaagcttttacttaagagattaccgttgatttcacttggagttatagcttacatactgacaaaatacgcgcagaaccatcaggattgggcggaaaaatacagtaggtctgtatatccgttattgtcaaaaatagtaggatttgtaccttcttgggtcaagttttctgttagtgaatggctcgtcgtgttggttgtgttactttttctattttatatcgtttattatgtgcgcaaggttatcatgagtaaaggtgtacgtaggatggtagtttatcgtggtgctctaggaatagttacgatctgtagcgtgatatatttttgttatactattttgggtggaataaactattacagatattcttttttgtcttataccgaatataaagaagagaactacagcaaggaggaactggtcaaattgagtaagtcgcttgccgttgaaatggaattggcaagggaaaagttagcggacactgatcttttggctcaagtaccagaggtttttgattattatgcacaacacgcagtgttctcgatgcaaatgttatcaaaggaatatcctattttggagcattctttatactcaacaccaaaaccagttgtgatgtcaaagctaatgtcgcatgcagggataaatggcatctttgtcccttttacttatgaatccaatatcaatgttaatgtgcccgttttcttggtgcctgctactatggcacatgaattggcacatcagagtggtttcatgcatgaggatgaggcaaattttatagcatatctggcatgtaagcagcaggatgatccaatgatactttacagtggtttttttctagcatttgtttattctatatctgagctaaagaaagtggatccagatcaggcgtctgatataatgtccagtctgtccaaggcggtgcagcatgatatagaacaaaatgagcagtaccgggataagtatgagggtgttatttcaagtatttcaagaaatgtaaatgatgtatatctgaaggcaaataatcagacagacggtttgaatagctatagtgatatggtgaatttgttgctggcagagcagcgagatagagaagtacaattaaatgtatcttgaatacttataggtttatatagtaatgatagtgggctcaagttgaacataggagtgagtgaaataaataaaataaaagacggcggccgggctttttacggccggattacgatgtcagcgccgaacttgatcggaactctcagccatttacattccccttttctcttgtaaatcaaaagattcttatagagcaaacggcattgcggtgacactttgagagagaaaatgaagaaggaaaactagaaaaggttccggaaagctgatgcttacggaacctttttcgttatgccgaatggctttttttcgtctgaacggtttccccggacttaattccaagcgatacgaacaagccgatcacagaaactccgatcaatatgataaacagaatatgaaacccggagattaaaccgatcagtgctgaagaaataatgcttccgaaataacggaaggtggagaaaatcccggatgcgatgccggacatgcccggttctaccgtcgcaagagaagatacctgcatgctcgtcagccccgcacctgacgcgatgcctcctacaataagcgatgccataagaaacggaacggaatgggaataaaccaaaagcagaaataagagattggctgcggccatcagcccgaaggacagaaaaatcattcttcgcgcgccccatttctgatgcagctgagctccgccccagttgctggcggacatgaaaacagaaaagactgacagcgccatgccgctgtgcgacgtgttcatgctgaagtggccggtcataaagagcggcataatcaataacacggcgtacatcattaaattgcttaacagaaccgacagattggcgctcgtaaaggtcgtgtttttaaacaggtcaaaatcaataatcggatgtttcgtgcgcagttcccgcctgaaaaatagcggaaccaatacgagaatgagcagcgcgtacacccaatagcccaaagagctttcatttttcgtcagaagaataatagatacaatgcttccggcaagcaaaacggacccgatgatatcaagcggagcgtcagacgtttcttctttatatttaggaaacatcattaatgccgtcacgagtgcgatcgcaagaaacggaatgttgacccaaaagatcgaatgccagctgaagctctcaattaatagagagccgataaacggaccgagagctgcgcccagcccggcgccgaggccgaaaaagccgaatactttcggaagccgtttttcagacacgacatggcggatgatggcgatgctgtttggcgtaagcaaagcgccgccggcagcctgaagcgcccggaagaaaatcaataagaaaagacttggcgagagggcgcaccccaatgatgcgatgagaaaaaggccgacgccccataaatacatttttttgtttccgtacatatcaccgagtttgccggcaatgggctgtgtcacggccatcacgattaaatacacggtcactacccatgtgatgctggcaattgattcgctgaatgagcgggaaatggatgaaagggcgactgcgatcatcgtagaattgatgggaacgagtatggctcccagcaaaagcgaaacgatcagcgcccattctttctttgaacccatccttcatcctccttggagccggaaaatgaccggccggtaatgcctttcatgaaaatctcagtgctgtgtttcagcatcgtttcctcagagagagtaatgactcttttccccagctgcagccggtgtataaaataaccgaaaatcatcgtcataaagacgtctgcattagcttcttcgctgccggggcttatcatatttttctttgtcagctccttaaagtaaacgattaaatgctttttcacggattgcggatatacgacaatatcctgcaggacgtcttcgaatagttccggttcgcgcaggcagatgcggaacacttcttttttttgttccaattgctgcagaagggtcgtggcgaaatgaagaagatcctcatacagatcgccttccgccttggtgatcatgctttccggaaccggcgcctgctgttcaatcatggctttcattaatccttgtttgtttttaaaattacggaaaatcgttgcttcgcttacttttgctttttctgcgatttcctttgttgtcgctgcgcggtatcctttttggatgatcagattcatcgcggcgtcaataattctcttgttcgtcgttctcaacatgtttcacctcgcgtaaatactggcaggacaagtatacacccgccctgcccgtcaataaagagggaaacctagcatgaagcgcgtttgacaattgtaatcttgccgtttgtcccgtctaccgtgacgatatctccgtcgttgagcctgtcagtcgcggcacgtgtgccgagaacggccgggagcccgtattctctcgcgatgatcgccgcatgtgacaggatgccgcccgtgtccgtaatgacggcctttgcatcctggaacagactggtccaaagcggtgtcgtcattttgcagacaagcacgtctcctgttgaaaaacgggaaaattcacttgcgtcacgaatgactttcaccggtccgcttgcgattccgcttgacgctgcaagtccgtaaatttgatgttcagtgtttttttcatcttctgtgatggagccggtaatctgttcagccgttttcagctgttccgaagtcggagtcccgagataagcgggggcttcaagcaattgatattgcttgaagagccgttttcgttcagcggctttttcctgcatcggaaccggcgacgccagcgctttctcgacttcatcgctgtataagtaccacatatcctcccgatcatcaattacgccttgtttttgaagcagctcgccgattttcagaaggcaaaggcgcgctttggcgtccagcatcgcatcaatataaaaatggtgatcatctttgatgacggatgaagacaatgtccactgataatagcggtcaaacgtctcccggaagccgtcatcttcaattctatccataaagtcggcgtagagctgttttcgtttttctatcgttttatgaaactcactgtcaaaatcgtatccgtttcggacatagttctgaatgttggccaaagcgaaataagggttttccgcccaagtttcttcaatgagatcatgacttttcacggatctccagccgtattcctgtaaaaattcgccgacttgttcaagaaagcgttttccctcatttgattgcagaagcgtctgatgcagctcatcggcatgagaaaccgtaaagacgcgccgcagctcagggctgtcttttacttgtccggaaagcagccagagctgtctgtcggtctccaatgacttattcatgacgccggccagcatttcatacagaagggaggtgttttctttctcaacctgtccgtacatagattccagtatcatgtttaacgcaacctgcggaaagacaatattgaaatgttctgcgtatccttttaaatagaagtcttgcaggtttcggaacgcatcaatggcagtctccggcgtatggtctgtatgcgccagttcgtccagcttttgataaaaaggcagaaaggtttcctgaataatattgtacatgcggtcagccaagacggggaaaagcgcttctaactgttctgcgggcagcttgtcgtccgtcttatgctgtctggaaaaaacatggccctgatgaagtttgacacgctcaatctcgatgcccatcacagggaaggccttcgtgctctctttgagaccgtattccaaagccggcacaatgagtgaagcgaataacgggctgacgggaccttctatattggactccatattgagccaaaaatctttctgatcccggggcgtcatgataaattcccgttcttcgtctgccgctttctgatcctgcgcgatcgttgtaatcggtctggcctgaagcagatagagcttattttcggcaaatccgaattcgagatccacgggataaccgtacagttcctccgtctttatcgtcagcatggcaagctctttgacgctctcgtcatcaaggcagaagcggtttctcatgtcagcggacgtctctttttccgtcacgccttcgtctttagagacgatatacatttcttttaagccgatttctttttcaatctgaaatgtgtctttattgacgataaatgtgtcgggcgtcacgctgccggagacgattgcttctccgaggccgtagctcgcgctgatcatcagttctccgtcatcatgtgtgacggggttgcggctgaaaatgactcctgaaacctcggaattgatcaaaccttgcacgacaacgcccattaacggttctgcggtgtcattgttcattttctctttataaccgctgacccgcgccgagaagaaggaagcccagcactctttcacttttccgagaaactcttcttcagttttgatatttaaataggtttcgtactgtcccgcgaaagaagcgccttcaagatcttcggacgcggaggaggaacgtacggcgacagaggcgtatgattctctcaattcataaaacgatgcggtcagctcctcccgaagctcttttgaaaacgtgccgttcataatggcgcgctccagctgttcctgatctgcttgaagcccgttgtcttccataaaacgtgtcagggcattcgtctgaatgataaaaccgccgggaacgggcagcccgtttttcgtcagtttaatcaggttcattccttttgctcctgcagagcggctcgattcttccgctttttgaaatcgcactgaatacatgcggtatgaccccctttttttcttcatccaagaaaatgatagtaaacactatcattacattgtaaagagggaggaagaaactgtcaaagatacaaagacctaaaccttctcatcctttcggctgaagaaaggtaattcgattcatctggttaatggttcaatggatttatattcacattttctttgacagatgattgaagactgccgaaaaagggtattgtgatagcaggggaacgattgtccgattcttcattttttactataatcagatgagatgaagaattcccgaggagggtttttgtgattacaaaagccgtttttgcattatgtttcccttttatgctggtcgtcctttttacgcgcgtcacgtttaaccactatgtggcgatcgctctcacagccgcactgcttttcgcatcctatttaaagggttacaccgaaacgtattttatcgttggattggatgtcgtatcgctggtggccggagggctgtacatggccaaaaaagaagcagacaaaaagaaagacaatgcctgacatggtgaatatgaaatagaatgcctgcttttacgccataaaagcaggttttttatacaaaaattgacttggtaaaaataaaccatcgaactttagttcgtatttttagtgattttgcccgtcattgtgttactatatcaataggaagatttcgtaaagaaacggaggcttttttgtgaaagatcgttttgagttagtctcgaaatatcagccccagggagatcagccgcaagcgattgagaagcttgtcaaaggcatacaggaaggcagaaaacaccagactctcctgggtgcgacagggacgggcaaaacctttaccgtgtccaatctgattaaagaagtgaacaaaccgacactggtcattgcccataacaaaacccttgccggacagctgtacagcgagtttaaggagtttttcccgaacaacgctgtcgagtattttgtcagctattacgattactatcagccggaggcgtacgtgcctcaaacggatacttttatagagaaagacgcaagcattaatgatgaaattgataaactgagacattccgcgacatcctctctgtttgaacggagagatgtcattattatcgcgagtgtgtcatgcatatacggcctcggttcgcctgaagaataccgggaaatggtcgtgtcgctcagaccggaaatggagattgagcggaacgagcttctgagaaagcttgtggatatccagtatgcccgcaatgatatcgactttcagcgcgggacgttccgcgtgcgcggagacgttgtggaaatcttcccggcttcccgtgacgaacattgtatcagagtggaatttttcggagacgaaattgagcggatcagagaggtcgacgctttgaccggagaaattctcggcgaccgtgaccatgtcgcgattttcccggcttcccacttcgtcacccgggcggaaaagatggaaaaagcgattctgaatattgaacaggagcttgaggagcgcttgaaagtgatgcgcgaaaacggcaagctccttgaagcgcagcggcttgagcagcggacgaggtatgatcttgaaatgatgcgggaaatgggtttttgctcagggatcgagaactattcaagacatttgacgctccgtcctcctggttctacgccgtatacgctgcttgattattttccggacgattttatgattgtcgttgatgaatcacatgtgacgattccgcaggtgcgcggcatgttcaacggtgaccaggcgagaaaacaggtgcttgtcgatcacgggttccgcctgccgtcagcgcttgacaaccgtccgctccgattcgaggaatttgaaaagcatatgcacaatatcgtgtacgtgtcggcgactccgggaccgtatgaaattgagcatacgccggaaatgatcgagcagatcatcagaccgacgggactcctcgatcccctcattgacgtccgtccgatcgaaggacagattgatgatctgatcggcgagattcaggcgaggattgaacggaatgaacgcgttctcgtgacgactttaacgaaaaaaatgtcagaggatctgaccgattatctcaaagaaatcggcatcaaggtcaattatctgcattccgagattaagacgcttgaacggattgaaatcatccgtgatctccgcctcggaaaacatgatgtgttaatcggcatcaacctgctgagggaagggcttgatattccggaagtgtcacttgtcgccattctcgatgcggataaagaaggcttcctccgttctgaacgttcgctgattcagacgatcggacgggcggccagaaacgcggaaggccgcgtcatcatgtatgccgataaaatcacgaattcgatggaaatcgcgattaatgaaacgaagcgccgccgggaacagcaggagcgctttaacgaaattcacggcattacgccgcaaacgatcaataaggaaatccgcgatgtgatccgcgcgacgcaggccgctgaggataaagaagaatataaaacaaaagccgcgcctaaactggcgaagatgacgaagaaagaacgccagaaagtcgttgagcaaatggagcacgaaatgaaagaagcggccagagcgcttgatttcgagcgggcggcagagcttcgtgatttactgttagagcttaaagcggaaggatgatgaacacatggcaattgaccggatcgaggtgaaaggcgcaagggcgcacaatttaaaaaacattgatgtaacgattccccgggatcagctcgtcgtcgtgacggggctgtccggatcgggaaaatcatcccttgcctttgacaccatttacgcggaaggacagaggcggtatgttgaatcgctttctgcctatgcgcgccaatttttagggcagatggataagccggacgttgatgcgatcgaagggctttctccggcgatcagcattgatcagaaaacgacaagccgcaatccgcggtcaaccgtcggaacggtaacggagatttatgattatctccggctcttatacgcgagagtcgggaagccgcactgcccggagcacggcattgaaattacgtcgcaaacgatcgaacagatggttgaccggattcttgaatatccggagcggacgaagcttcaagtgcttgcgccgatcatctcaggcagaaaaggcgcccatgtcaaagtgcttgaccaaatcagaaagcaaggttacgtaagggtgcggattgacggagaaatggccgagctttccgacgatattgaacttgaaaaaaacaaaaagcattccattgaagtggtcattgaccggattgtcgtcaaggaaggggttgccgcccggctttccgactcactggaaaccgcgctccgcttaggggaaggccgtgtcatgatagatgtcatcggtcaggaagagctgatgttcagcgagcatcacgcctgtccgctgtgcggtttttctatcggggagcttgaaccccggctgttttcgtttaacagcccgttcggcgcctgcccgacttgtgacggtctcggtttgaagctggaagtggaccctgagctcgtcattcccaatcctgaactgtcattaaaggaacacgccatcgcgccgtggacgccgatcagttcacaatattatccgcagctgcttcaggcggtctgccgccattacggcattgatatggagactccggtcaaagacctgccgaagcatcagcttgataaagtgctgtacggcagcggcaatgaacggatctactttaaatacgagaatgatttcggacaagtgcgcgaaaatgaaattgaatttgaaggtgtgctgcgcaatattgagagacggtataaagagacaagctccgattatatccgtgaacagatggagcagtacatgtcacagaagccgtgcccgacgtgcaaaggctaccggctgaagaaagaagcgcttgccgttttggtcaacgggcgccacatcggcaccattaccgagctttccgtcggcgatgcgctggaatttttcaaaaacctgacgctgtctgagaaagatatgcagattgccgatttaattttaagagagattgtggagcgtctcagctttttagataaagtcggtcttgattacctgacgctgagcagggcggcgggaacgctgtcaggcggagaagcccagcgtatcaggcttgcgacgcagatcggctcccgtttgtcaggcgtcctgtacattcttgatgagccgtccatcggccttcaccagcgtgacaatgaccgtctgatcagcgcgctgaaaaacatgagggatctcggcaatacactgattgtcgtggagcatgatgaagatacgatgatggctgccgattacttgatagatatcggcccgggcgccggcattcacggcggccgcgtcatatcggcggggacgcctgaagaagtgatgaatgatgcggattctctgaccggacgttatttgtcaggggctcaattcatcccgatgcctccggagagaagaaagcctgacggccggttcattgaaatcaaaggcgcttcagaaaacaacctgaaaaaagcgaacgccaaattcccgctcggcacttttacggcggtgacaggtgtgtccggttcgggaaaaagcacgcttgtgaatgaaattctgcataaggcgcttgcgcaaaagcttcataaagccaaagcgaaaccgggaagccataaagaaatcaaaggccttgaccatcttgataaggtgatcgacatcgaccaggcgccgatcggccggacaccgagatcaaatccggcaacttacacgggtgtgtttgatgatatccgcgatgtattcgcgcagacaaatgaagcaaaggtgcgcggctataaaaaaggccggttcagttttaatgtaaaaggcgggcgctgtgaggcctgccgcggcgacggcatcatcaaaattgagatgcacttccttcctgacgtgtacgttccgtgtgaagtgtgccacggcaaacgttacaaccgggagacgcttgaggtcacatacaaaggaaaaagcatttccgacgttctggatatgacggtggaagatgctctgtctttctttgaaaatatcccgaaaattaaacgcaagcttcaaacgcttgctgatgtcggacttgggtatgtgacgctcggccagccggcgacgacgctgtcaggcggagaagcgcagcgcgtcaagctagcttccgagctgcataagcgttccaccggccggacgctgtatattctggacgaaccgacaacagggctccacgttgatgatatcgcaaggcttttggttgtgcttcaaagactcgtcgataacggtgataccgttttggtcattgaacacaatctcgatatcattaaaacggcggactacatcgtcgatctgggacctgaaggcggagcgggcggcggcacgatcgtagcctccggaacgcctgaagaagttgtcgaagtgaaagaatcatatacgggccgctatctgaaaccggtaatggaacgcgataaaaaacggatgaaaacattgctggccgaaaaagaaacggcagccacgtaatagatcaataaaaacagcccaaaactcatcggttttgggctgttgttgttacaggctttttttctgttggggaagctgtctgcttaaatgcattaagtcctgcagaatatgggtgctgctgctgtccagcagcacttttatatattggatatcatgggaaatgggaagaggggctgctttgatctgttctaattcagccagcatttcgctgttcattcttttctgttcgcgaattaaatttcgaagactctcttccgttacttgggcgttttcgggatctttctccatttgtatgtcctccttgcatacggtcaggctttgttacatattgtaatcggttcggggaaaagattctatagtgaaatctctgaaaccaaaaattacgtataacgaagcatgtccttagcatgaaaatgaaacccgctcattcgtcatacgtatgtataaggaatggttttttatatcatggcacagggagtgtttttattgaaccgaaatcaagcgattatcgcatcaatctgttatttcagcgtgtttctcgcgccgctcattcttccgattgtggcttactttgtcgtcgatgaaaaagagacgaagcggcatgccatgcgcgctctgatttcccatatcattccgtttgcgggcttgctgattgtgaccgccggtgttgtcggcggattgattacggcccagggggagagtatggtgcccgtttttgttatgataacaggagcagctgtttattttctgatcctcatcggaatggtcatttggaatatcgtgcagggaattaaggtgttacgccaggtgtaagaaaagtcgggggaggagttttgtatgaaacaggagaaagaacggattttaaagcttgtggaagacggcatgctgacggcgcaggaagcactgacgctcattgaaaaactggatcatgaatataaagaaaaagaagatcagatcaccgcattatctgcggaggttcaggaacctgcggaagatttcgaaagcggtgcaaaaggaagccaaaagccgtcgctcggggcgaagctgttcgactggattgattctgccgtcaaaaaagtgaaggaagcggatcttgatctgaatttcggccacgcacacgaagtgcagcatatttttcaatttaaagacagtgaattctcggccattgatatgcagattgcaaacggcagcgtcaatatcgtgccgtgggcggatgaagatatcagagcggagtgccaggcgaaagtgtaccgggcggacagtcaggaggcggcgcgcaccgcatttcttcagcatattgagtgtgaagtgaagggcaataagttttttgtccgcacggaaaagaaaacgatgaaaaccaatgttacgctttatgttcctcagaaagagtacgataagataagagtgaagctgtttaacggaccgatcagaggggaacatttacatgtaaaagaattctcggcgaaaacgacaaacggcgttctgtcattctctcatttgacggctgagaaagcgtcggcggaaacggctaacggacaaatcaagctggccggacatcaatgcggcgcgattgaagcggaaacgatcaacggcttgattgatttgcgcggatcgagtgaatccattgacgttcaaagctttaacggcaatatcatgcttaccgtgacagcgccgcactgccgctccatctacacgaaaacgacgaccggaaacgtggagatcgccctgcctgatgattcggcggtgaaagcggagctcaaaagcaatctcggctctctcagccatgagctgattgatgcggaaattttaaaggaaaagaatgataccattcaaaaagaactgatgctggcatcaaatcaaggccatgatcagcatctctcgattttctcagaatcgttaacaggagccattaagctcaagcatactcagaggtgattggatgaaaagactttaccgttcagaaaaaaaccgtaaaatcgccggcgtcgtcggcggtttggcggagtacatcaatatggatgcgtcgcttttgcgcattatcaccgttgtattagcgcttgtcacgagcggaatcgtgccgattgtatatattatctggtgttttgttgtacctttagaaggagatttgaaataaatgatcaaatgggcagtcagcattttagtaaatgctttattattaatcgttatcgcgggatattttgattccgtccatatcagcagtatcggagcggctgtcatcgccagtgtgattctttctgtgttaaatgtgctgatcaaaccgatcatcgtcatattgacattgcctgtcacggttgtgaccctcggcctctttctgtttgtcatcaacgccattacgttaatgatgaccgcagccttgatgggagacagctttcagattgacgggttcggcaccgccatttgggcatccgtcgtgctgtccgttttccacttgctgatccaaaaaggcatattggagccgcttagaaaaggataaaaaacaagctgtcccgagagggcagcttttttatgtgcggtttacataagcggcagcctcctgacgcaacataatgcatagggaggtaatgagatgaaacttgtgatgacgctcttttttctgattggtttgctttgtgtgagtccttctgcggatgcggcgcgcaaagaatcggcaatccccgtgaatcagcaggaattcggacagccgcctcattacataccgcttctggagaatcctccccaaatcgaagtaaaggcggaaatgaaaagaaacctgttcatacaggctcatgtacggaatgctgactatcaagcgttttcggcgtttcttttttataaacaaagcaatgagctggggtttaagatggtgccgatggagcccgcgccaggcgcaatccggctttttacggcccaggtttcaaaacgggatatctggaatggagaattggaatattacctcgttttcaccaacggcagacagcgggcggaatcggagaaaaagcggctgaagctggacggctatcaagccgatttgaatcatattcccgagctgatgattacggagcttgcggttgatacgaaaaatgaagatggcgctgatgcctatgaatttatcgaggtgtataacacgacggacaggcccattcattttaaagactatcatatccgctaccgctatccgaaggaagggccggaatcagatatgatatggaggccgaaagaggataccgtcattccgtcaggcgggacttacgtgttttggctgagacgcgccgcatcagaactgacgatagatgatttcaaccgctattacgggacacgtctgaaggaaggagaacatctcgccgtcatcgaagggacagacggaatgtccaacggccgcccgcgtacggtcgtgctgtcggcaaataccggcaaggatatcgcctcagcgcaataccggaaacacgctttccgccggctgacttctttgctgtacaaatatccgctgaacggaacgggagaattgctgaagatctccacgagcgagcataagccgtcaccgggctccgtttttcaggcgcagattccgcagcagaaaagggtgatcaaacccgacaaggaaaaaccggtcatcgaagaccttacagacagaaagcccgtccggcccgctgaaagcattgaattaaaggctgacataaaagacaaaaaccttgtcaaaacagccgcgttttattaccggaccaatgagaaaaaaccattcaaacgaattctggccgaaaaagaccgcaacgacagcttataccatcacattctttattccccggaactgctcggccaggatcagcttgagtattatatcgcagccagtgatggagaaaatgaagcaaaaacgcccgtcaagatgattgacattgaacagacgagcaaatcacacggactcagaatgaatgttgaaccggaagatacgatatccggcacctatctgctcaaagcgacttccgacgtcagcgccgataagatcaagctgtggattgacggcaagcggcaggagacccggccggcgctggaaaaagaggtctatttcgccttcgatgcccggaaaacgaatctttattttcaaaacaccgtcatgatggaaaacgaggtgctgcacatttttgacgatccgtctcaccgctacagaacgcactcggttctgcttccggaacgtctgctgctaaaagggggcaaaacacagaaagtatccatccgttcgggctcaaaggtttctccgtatgacacgggagagaatcgggatgattttgtcgtgaaacatgcccgtctggtgctttcggacggaacggtgatcaaagacgggaagacggacccgtccgagcagctgtttatcggtgacggcaagcgggcgaatcagcagaagaccttctcattcagcctgccggatcatttgtttacgtcacggctgctgccgtggaacacggcgaagctttcggaaggctatcaccatatttttgtcagtgacggtgaggagcagctgagccaatctgtgagggtggacaattcggggccgaagattgtcccgggtattaaagaaggcgcggcgctgaaaggtaatgttgagctgaatgcggacatccgtgataaatggagcaaagtggaagaggtgaaagcgtttttggacggagaaagcattacgctcccgcatcacacgtcatcagccgatctcaagcccggaaagcacacccttactatcattgcggcagaccttgccggaaatgaaacaacgtccgtccgcaccttccatatcaaacgggaggagccgaaccagccggagcttgccggtcaaaaaatcggcgcccgcaaagcaaagctgtccgtccgggtaaaagacccgacgaaggatgacatgaatgtatcattttatcgcggcttccgttataccgcgcggaatccgggcagcgtgaaagtgtataaacacgcctcattaacggaaccgccgaagggcataaaagaaaatgaaatgccgtttaccctgccggaaatgaaccgtatctcggcaaatgacggaaaaaccgtttcggcggaaagtgtggagcgttttccttatcaccggttcgaagtctccgttgacccgtctatcgacgaaacggatctggccgaggcggtctggaaaggaagctctctgcccggccgaaaggtaaccatgtatatttggaattaccggacaagccgctggcaggaggcggacagcgtccttgccaaagataaaaagccgtttacattaaaagccgccgtttccgcagcggatgtggtgaagaactcaaaaatgaatgtcatcgtgcaggatcaaataccggcgaaaggcaattacacgtttgtctggatgtcggatacacagtattacgcacaagggcacccgcacatttttgacaaaatgacggagtggatcaaagaaaataaggaaaagcacaatattaaatatgtctttcataccggtgatattgtcgatgattcaatggtgatgaaacagtggaaaaacgccgatcactccatgcggacgcttgacaaggcggggattccgtacggagtgcttgccggcaatcacgacgtcggccataaagacggcacataccgaaccttcggggatttcttcgggagccgccggtttgaacagaacatgcattacggcggatcatacaaaaataaccgcgggcattatgatctgctgtcggcaagcgggaacgattttattatgatttatatgggctggggcattacggaacaagagattgactggatcaatcaagtgctgaagaggtatccggaccgaaccgccatcttatgctttcatgagtacttgcttgtgagcggaaatcgaagcccgatcggggagacgatctatcgaaaagtcgtcaagccgaatcgcaatgtggcgatggtattaagcggccattaccataacgccatgaaaaaaaccgatgcgcttgacgatgacggagacggaaaaccggaccgcctcgtccaccaaattctgaccgactaccaggacggtccggaagggggcagggctttatgcgcataatgcaatttgatcaggccgccaatcaggttcacatgttctcctactcgccgtacacggatgacatcaattactatgacaccgatctgttcgctgataaagacgaattctcagcagaaatggatttacagccgaagaggaaaagggtagcgactgattattttgaatgcaacgtttatacgaacgaactgctcggtcataaaaaacacgtaaaaagcggaaaaaccgcaaattgggtctgggacggcctgcagcctgattccgtttattactggtacaccgtcgtgaaggacccgtacaacggcaaaacaatatcaccgctgtggatgttcaaaacgggaaatacgccgtatcacccggctccggatcagtttgatttcaggcatgcctcaaacccatagcaaaaacatacacctgccgatcggtcagaagaaaatctgacggtcagcaggtttttttctgtaacatgcatggcggtaagtgtttttgacttttttatgtcccttttctatactaaaatcgattggttttcgtaatatgcaggaggaaacataatgaacagtaaaaccgggacaaaagaaagaattattcaaacctctgcatatctttttcagattcagggataccatgcgactggtttgaatcaaattataaaagagagcggagcacccagagggtcagtgtatcatcactttccaaacggaaaagaagaactcgccattgcggcgatcaaatatacgggaagatgcgttgaaaagcagatacagaatagtatgtctcaatccgcggaccctgtagaagcgattcagcactttattcatgtaacggctgaacagtttaatgatccgcagaatattgagggcgtgccggttggattgctggcgggtgagaccgctctgatcaatgaaacgttaagatgcacatgtgttgaggtgttcaagaagtggacggatgtgtttgcggcaaaatttcttgagcatgggtttgaacaagaggaagcggagaagcttgggatgacaatcaactcgatgattgaaggcgcaatcatgttttcattggctcataaaaacaaagaaccgctgctgctgatttcaaagcaggttccgtatattgtccaaaacagaggatagcattttattactcttttctttataaaaatagataccggaaccccagcctcttcgttttgacagagtcatagagaacattcaccggcttgatttgaaaatggcagatcaaaaaaacatctccaacccgtaacggttggagatgtttcatttcaccctgtccatataatgcacgaatgtgtagcggtcgcctctgtaggcggatttgacgtgctcaaaggcagtgccgtcctgcagataagtggtccgcttgatatagaggacgggggcgccgggctggataccgagcagctcagcttcttcctcggaagcggttcccggttcaagctcttgttttgcccgtgagatcggcatctgattgtacgcttcaatatgctcatacatggatgattgaaaatgggaggcatccaattttcccgccttgtcaaacgggatatacgatgcctcaatcgccatcgggatatcatttgccagccggacgcggatgattttatgaagcgttgccggatagccgcaccccaggatagaagataattcttccgtcgcctgaatcagctggtattcggcaagtctactccccggcttcatgccccggcttctcatatcttcggtgaagcttgtcagcccttgaagcggctgttccatcttcagtttgctgacgaacgttccccggcctttctgtctgtataaaaatccttcattcaccaaattggaaagcgcctggcgcaccgtcatgcggctgatgccgaattgttcggcgtattcccgctccgacggaagcagcgcatccgctttcagctcgccgtttttgatttgtgtttttaattgttccataatctgaaagtaaatcggaatcggagattgtttatcaatctgcataggtcaaatcctttcaatcgccgcccgcagccttttcatcaatcaagaccgtcacatccggatgcgcgtgcagggcggaggcggggaatgcttcgctgacgcgcccgtccagaagctgcttcaccgcttgggccttgctttttccggatgccatgatcagaatccgtttgccggacaaaatcgtcccgatccccattgtcagggctttttcagggacttgatcaattgacggaaagtaccgcgcattcgcctgtcttgtctcttcattcagctcaacaacatgggttcgggattcaaatggcgtcccgggttcattaaagccgatatggccgttgtgtccgatgcctaaaagctgtatatccgctccgccgagtgtttgaatcaatcggtcatagcgcccgcattcggcatcaagatcgtctgcccgtccgtcagggagaaagtggcggtcctttcggctgtcgatatgtgcaaaaaaatgtgtattcatataataatgatagctgtttttgtcctcgggagaaagcccggcgtattcatcaaggttgatcgtcgtgacattccggaacgacaagccttctgagcggtgcatccgcacaagttctttgtatacgccttcaggagtgcctcccgtcgcaaggccgagaacggcatccggcttttgtttcactgtttcagcgataatcgctgcggctttttcacttaattcttcataatgtctgcatgtgataacgttcatgtccaatcagcctcccttgagatatatgcggtgtttccgcggcaaatcgtggccagcacgccgcactgtccgtccgtcagaacaacgtcggcgtcttttccttcggcgatgcttcctttacggtcgaatatgccgaggcggcgggccgcatttgccgatgtcatatttgctatatccggccatgagcagtttgtaaacctgcgcatgagcgccgcgccttcattcatttttaaaatggaaccggccagcgtcccgtcagagagaagcgccgtgtccccgcgaacggtgactttttgtccgccgaattcgtattctccgtccttaagcccttttgcccgcatggagtctgtaatcatgatcaggttttggcttcctttcgccaaataggcaagcttaacagccagaggatgagaatgaatgccgtcagtgatcagctccgccgtgatgcggccgcaggcgagagccgtaccgatgcccccggctcacggtgatgaaaggagctcatggcgttaaagaggtgcgtcatatgcaccgccccggcatccgccgctttttgtaaaagctcggctcctgcgtctgtgtgtcccattgaggggatgatgttttggttttttaaataacggatcaggctgaaatcaggatcttcttccggcgcaagcgtcacgattttgatcagccctcccgagagccgctcccatttctgaaagagcccggcatcagcaggagtaatccattgtttcggctgtgctcccgcctttttcggagagacaaacggtccttctaaatgaatgccgatcaactcagcgcctttttgggtctccggtgaggaatacgcccattttttggcgttgatgagcgctttttcaatgttttcgtgctgctgtgtgatcgttgtcgctaaaaaagcggttgttccttcttcgggcagccgggcggacagtgtatcaagagccgcaacatcggcatccatcgtatccgcgccgtatccgccgtgaatatggatatcaatcattccgggaagcgcatacgagccctcgggcgccttccattccttctcatacgtttcttgcggccttgtttttcccgcgtaagaaatgatgccgtcctttataccgagaaaaccgtttcggatgatttctttttctgttacgatgtccgcaccgctgattaacaagctttcagccactttaaaacacgcctttctggttagttgttagttttattttactccttttcagactagttatctagaccagttatgccggaattgtataaatctgttttggttcagacggtaaagtgataaaatataactgttcaaagctcggaacatcccagaacaggaggaacatatcttggcaaaggttcggaccaaagacgtaatggaacagttccatttagaattgatcagcggagaagaagggattaaccgcccgattacgatgagtgatttatcacggcccggtattgaaatcgccggttattttacatattacccgagagaacgggtgcagcttttaggaaaaacggagctgtcatttttcgatcagcttcccgaggaagataagaaacagcggatgaaatcgctgtgcaccgatgtgacgccggctatcatactttccagagatatgccgatcccgccggagcttgtagaagcttccgagcaaaacggcgtgcctgtgctcagatcccctctgaaaacaaccaggctgtcaagcaggctgacgaattttcttgaaagccgtctcgcgccgacaacggccattcacggcgtgcttgtggatatatacggcgtcggcgtgctcattacgggaaaaagcggcgtcggtaaaagtgaaacggcgctggagcttgtcaaacgaggccatcgtcttgtcgcggatgactgcgttgaaatccggcaggaggatcaggatacccttgtcgggaacgcgcctgatctgattgagcatctgctcgaaatcagggggctcggcattataaatgtcatgacgctgttcggggcgggcgccgtcagaagcaataaaagaattacaatcgtcatggaccttgagctttgggagcaaggaaagcaatacgaccgtctcggacttgaagaagaaaaaatgaaaatcattgatacggaaattacaaaactgaccattcccgtccgcccggggcggaatctcgccgttattatcgaagttgcggcgatgaacttcagattgaagcggatgggcttaaatgctgccgaacaattcacgaataagctggcggatgtcattgaggacggcgaacaagacgaataggagttggcaataatatgaatgaagctggaacaccgatcaatccgattgccttgcagctcgggcctttatccgtgcactggtacggcatcattatcggcgcgggcgcgttattagggctttggatggccatgagggagagtgaaaagcgggggctgaaaaaggacatttttattgatcttgttcttttcgccatcccgatcgcaatcatttgcgcaagggcatattatgtgcttttcgagtggagctattactcggaacaccccggggaaatcattaaaacttggaaaggcggcattgcgattcacggcggattaatcggcgcgatcgcaacgggaattgtcttttcaaaagtaagaggcatctcattctggaagctggcggatattgccgcgccgagtattctgctcggccaggccatcggacgctgggggaactttatcaaccaggaggctcacggtggagcggtcagccggtcatttttggaaagtctgcatcttccggatttcatcattaatcagatgtacatagacggacaatattatcacccgacgtttttgtatgaatcgctgtggagttttgcgggcgtcgtgattctgcttctgctccgccgcgtgaacctgcgcaggggcaatctgtttttgacgtatgtgatctggtattcaatcggcagatactttattgagggaatgcggacggacagcctgatgcttacgagccagcttcggatcgcgcaggtcatttccattgtgctgattatacttgcgattattttaatgattttcagacgcatgaaggggtatgccgataagcggtatgctgacacggactgacgactgaaatcggaaaggacataagatgactgataaacatgtaaccgccattttattcgatctcgacggcacgctgattgacacgaatgaactgattatcgcttcttaccttcatacgcttgatcattattgcccggggcagtttaaaagggaagatgtacttccgtttatcggcccgcctctgtacgaaacgttttcaggcattaatgccgaaaagtgcgatgacatgatcagcatgtacagagcattcaaccataaaaagcacgatgagctcgtcacggagtacgaaacggtttatgaaacgctggatgaattgaaaaaagcgggctatcagcttggtattgtcactactaagctgagggatacagtcaatatgggattgaagctgacaggcatcggggcgtttttcgatactgtcgtcacgcttgatgatgtaaagcacccgaagcctgaccccgagcctgtgcggcttgcgctcagccggcttgggtgcgatccgtcggaagccatcatggtcggtgacaattatcacgacgtcatggcgggaaaaaacgccggcacgaaaacagccggcgtcgcgtggacgattaaaggcgcacagacgctttccgcctatgaacccgattatatgctcgagaaaatgagtgatttattgcacatcaccggagtgaagtaatccgtgagaaaaacagaccgccatccggttgcaggtgcaaattcattgtggcatgtttatcagacggttcccttcctgaaggtgatgaaaaatttcatcatcattcagattgcaaggtatacgccgtttttaagcgtgaaaaactggctgtaccgaacctttttgaaaatgaatgtcggaaaacagacgtcattcgcgctgatggtgatgccggatatcatgtttcccgaaaaaatcactgtcggaaaaaacagcattatcggctacaatacgacgattttggctcatgaatatttaatacgtgagtaccggaccggttttgtcacaatcggtgacgaggtgatgatcggggcaaacacaaccattctgcccggcgtcaccatcgggagcggagccgttgtatcagccggcacgctggtgcacaaagatgtccccgccggggcgtttgtcggaggaaatccgatgcaggtgatttatacgcacgaagaaatgaaaaaacgaatggaaaaccccgcagattaacgtcagcggggttttttatgacttgatcacaatggcctggctgcccatctgcttccaggctttttcaaagtcagaccggtctgtttttctgtttttatagccgtaaggatcattaacgtatacataatcgtgatcataaccggttacggctacgctatgcatgctgaacgtaatgtcgatctttccgttcggtgtatcccaagtctgcatatgatcaaccggcttaaaggatgtggtggtaatcacccagaccggccgccctttttcaagctggcggtacactgaagaaatgtcttttcccgtaagatcgtatactttgtttcccgcatattctttggcaagtttatcaatcggctcatgataaacgcctaaacccgggccgttttccatatctccggcaaatccttcattcggatctcccttcagcccgctgctgtatgtgagcggaactttattgattttatccgccaatgtattttttgacacatgatatccggcattgttcaaaatcatggcaaggctggtcacctcacagccattgtacagtctgggagaatccatctgtctgtacagaacgacattcagcggtgacgcgctcccttttaacggtgttttctcatcaggctcgtcggactgctgattgaaaaaatttaaatgaatatcgtttgtatagatgttatatcccagatagacaaggatggctgtcagaatcagcacacataatgttccaagcgtcttcattatcaattattctcccttgtttctgatgaagctgttctatgtattatagcacttctgctcaatatgattcgatcgttccgatatgtttacaggtttgttcattctttagccatgtttatggaaaagaataggcggacattgggcgttgcaatccattcttttatctgctaacatattatcatattagcgaactaaaggattcggaattttccttcagacaaagcggaggtgtaaaaggcaaatgtttatgtttgagaaaccgcatggcatgagagatacgctgcccggtttatacgaagccaagaaaaaagtccgttccacactgacggatttaattgataaatggggttatcagtttatggagacgccgacccttgaattctatgaaacagtaggcgtccagtcagccattgaagaacagcagctgtttaagcttctcgatcaggacggaaaaacgcttgtgcttcggcccgacatgaccggaccgattgccagggtggcggcatctaagctgcacaaacacaatcatccgctcagagcggggtacgcggcaagcgtctatcgcgctcaggagcgggaaggcggacgtccggccgaattcgaacaggtcggcgcggagctgatcggcgacggatcaacaagcgcggacgccgaggtgattgcgctggcggccggcgctttgaaaaacgcgggattgcaccggtttaaaatcgcgatcggccatgccggactcgctgatgagctgtttgtcgaggttttgggcaatgccgagcgggcggatgttctgcggcgctttctctttgaaaagaattacgtgggatacagggaacatgtcaaatcgcttccgctttcttcaatagacaaaagccggctgctcgcacttttggaattgcgaggcgggaaagagatttgcgccaaagcggaggagatcatcggaatctccggacaaagcttaattcaggagctggaagacctgtgggacattcttgaggattacggatgtgccgagcatattcgccttgatctgaatatggtaagccatatgagttattacacgggaattttattcgaagtgtacgcggcaaatgtcggtttcgtcatcggaagcggcggacgctataacaatctcctcggccatttcggcagtcccgctcccgccacgggcttcgggctccgtatcgacaggctgattgaagcgctcggcattcaggaagaaacaagtgaagcggacgccgtgattttcagcaaggagcagcgggcccaggctattttattcgcggaggaagaaagggcgagaggcagaaaagtcgtcctgcaggatctggcgggcattgaaaatatcgatcatatgacaaaatcattcgcaaacgtcacatactttatcggtgccagaaaggaagagaggaatgggtaaggtactcacaatggcaatgccaaaaggacggatattcgaagaagcggccgggttgctgaggcaggccggatacaggctgcccgaggagtttgaagaatcgagaaaactgatcattgacgttccagaagaaaatctccgctttattctggcaaagccgatggatgttacgacttatgtcgagcatggcgtcgctgatgccggtattgccggaaaggatgtcatgcttgaggaagagcgtgacgtgtatgaggtgctcgatctgaaaatcagcaaatgccatctcgccgttgcggggcttcccggggcggattggaacggagtcgcaccgaggattgcgacgaaatatccgaatgttgcgtcgagttatttcagagagcagggcgagcaggtggaaatcattaagctgaacggctccattgagctggcgcctttaatcgggcttgctgacagaatcgtagatatcgtatcaaccgggcggacattaaaggaaaacggtctcgttgaatcagaacatatttgtgacatcacatcgcgttttatcgtcaatccggtcagctaccgcatgaaggatgatgtaatcgacgaaatggcggccaggctggcacgggttgtggaaggagaaacggcaaaatgaacataaccgcagtaaaaagaagcgagcggttttcactgaagcgttccatcgacagcggaaccgaagagcagcggaaaaccgtcagggggattattgaagacgtcagacaaaacggtgacaaagccgttttggcctatacaaaaacatttgacggcatcagcctgaaccaaatggccgtgagcgcagaggaaatcaccgaggcataccgtctgcttgatgatcagctgctggaagtgatcagacaggcgattgccaatattaaagaatatcacgagcgccagctgcaatcctcttggttttaccatcgcaaagacggctcgatgctcggacagaaaataacggcgctcgattccgcgggcgtatacgtgccgggcgggacggccgcttatccgtcttccgttttaatgaatgtcatccccgcgctcgctgcgggagtggaacggatcgttctcgtcagtcctccgggaaaagacggccgcctttcaccgggcgttctggcggcggcgtctgagctcggcataaaggaaatttacaaagcgggaggcgcacaggcgattgccgcgctcgcttacggaacggaaacgatacagcctgttgataagatcacgggccccggaaatatatttgtagcactcgcgaagcgcgaagtcttcggcgttgtggatatcgacatgattgccgggccaagtgaaatcgtggtcctggcagacgatacggcggtgcccaaagaagtcgccgctgacctgctttcacaggccgaacacgatatgctcagttcaagcgtgcttgtcaccgattcacagaagcttgccgaagcggtatcagatgaggtgaataaacagcttcagaccctgccgcgcaaagaaatagccgaagcgtcgatcagggatcacggccgcatttatattacggaatcgatggaagatgcggtggacacggtgaatgagctggcgcccgagcatttagaaatcatgacgcattcgccggaggctttgcttggaagcatcagacacgcgggggcgattttcttaggacgatacagcgctgaaccggtcggcgattattttgccggaccgaatcacgttttgccgacaaacggaacggcgcggttttcaagcccgctgaatgtaacagattttcaaaagaaatcgagcatcatctcttacagccggaaggcatttgaaacgcacgcggacagcatttccgccttcgcgagactggaagggctggaagcgcacgcaagatcgattgaagcgagaaacggaggaatgaccgatgagaaaagcggaacgcgccagaacaacaaatgagacggatataaggctggctttcgaaatagacggagaaggaaaagccgacatcagcacggatgtgccgtttatgactcatatgcttgatttgttcacaaagcacgggcaattcaatttaacggttgacgcaaaaggcgatacggagatagatgatcaccatacgactgaagatatcggcatctgtttagggcaggcttttttggaggcgctcggtgataaaaaagggatcaaacggtacggatcagcgcttgtgcccatggacgaagcgctcgcccaagtcgccgtagacctgagcaaccggccgcaccttgagatgcgcgctgcatttccgcaagcgaaagtcggaacgtttgataccgagctggtacatgaattcctatggaaactggcgctcgaagcgagaatgaatctgcacgtcatcgttcattacggcacgaatacccatcatatgatagaagccgtatttaaggcgcttggcagagcgcttgatgaagcgtcatccattgatccgcgcgtcaagggtgtgccgtctacgaaaggaatgctgtaaatgatcggtgtaattgattacggtatgggcaatttattcagcgtgtcgaaagcgctggaacgcgtcggcgtcccgtatgtcgtatcagaccggccggaagagcttgaaaaagcggatgcttttattcttccaggtgtcggatcattcagtgacgccatggacaatttacgcagcacgaagcttgatcaattcatacaccgtatggttgacgagggtaagctgctcctcggcatctgcctcggcatgcagctcattttcgaagagagcgccgaaaacggctctgcaaaaggacttggtttattagccggaaaagctgtgagactcaaagacagagatgccgaaggaaacaagctgaaggtgccgcatatgggctggaaccggctgacgtttcaccaaacgtctcctttgctttcggaagcggaagaaggcttcgtttactttgtccattcctattatatagacgggatggaagacggcgatcttctggcaagcgctgagtacggcgttcgtgttccggctgtcgtcgggaaacgcaatgttttcggtgcacagtttcatccggaaaaaagcggtacagccggaatggcgatcttaacacaatttacaaaaatggcagcggaacagaaggtgaagaaatgaacgcttttacattatatccggcaatcgatatgagaaacggcaaatgcgtccgcctcatccaaggcgattacggcaaggaaacgatatacggtgactctcctttagacatggcggcgcaatttgcacaagaaggcgccgaatggattcatctcgtggatcttgacggcgcgaaagcaggcaggaaagtaaacgacaggcatgttcttgacattgcgcggcagcttgatgtcaaagtcgagatcggcggcggtatccgttctgaagcggatgtgtacggttatttatcacaaggcgttgatcgcgtcattctcggcagctcggccgtttccgatccggcatttgtgaagagcatgctgaaacaatacggcggcaaaatcgcgatcggccttgatgcaagaaacggatatgtctcgacggaaggctggctggaaacatcctcggtaatggcggccgatctgggccgtgaattggcggccgaaggagcggaaaccttcattttcacggatattgcaactgacggcatgctgtcaggaccgaacatcgaaagtaccgttcagctcgcaaaagcaacgggaaaagacgtcatcgcttcaggcggagtcagctcagtcgccgacctcaaagcactggcccgcttcaaagacgccggcgtatcgggagcgattatcggaaaagcgctgtatacaaaacaattttcattggctgaagcgctcagaagggtgaaggacgcatgatcacgaaacgaatcattccgtgtctcgatgtgaaagaaggacgcgtcgtcaagggcattcaatttctcgggctgaaagatgcgggcgatcctgtcgagctggccgaagcctacgacagggagggcgctgacgaacttgtttttctcgacatttccgcctctcacgaaggccgcaagacgatgacagacgtcgtagaacaagttgcggcaaaactggcgattccgtttacggtcggcggcggaatcaatcaattaagcgatatgaaacgaatgcttcgcgccggcgctgacaaggtatccgttaatacagcggccgttctccgtcccgagctgattacggaaggagctgagtttttcggctcgcaatgcatcgtagcggcgattgacgcaaagtatgacgaagattcggaatgctataaagtgtacacacacggcggcagacagaaaaccgagcgggaagtcacggcctgggcaaaagaagccgtcagccggggagcgggtgaaatcctgctgacaagcatggacgcagacggtgaaaaaacaggctttaatcatacgctcacacagcttgtctcacgtgccgtcccggtgcccgtcattgcgtcagggggagccggcagcgcgcgccatatgcttgaagccttcacagtcggtgaagcggacgccgcgcttgcagcttctattttccattacaaagagacatctataaaagaagtgaaagattatatgaagaaacacggggtgaatgtgagatgaaacaggcagatgaactgcggtttgacgaggccggactgatacccgccatcatacaggatgcggcaagcaaagaagtgctgacactggcttatatgaaccgagaatcctatgaaaaaacgatagaaacgaaagaaacctggttttacagccgttcacgcggggagctgtggcataaaggagcgacatcggggaatacccaaaaggtgaaagccatccgttatgattgcgatcaagatgccctcgtcgtgcttgcggagccctcaggacccgcatgccataagggaagctacagctgtttttccacggaaaaagcagacgcgcaggatcgtttcggcatcttaaatgaactggaaagcgtgatcgccaaacggcaggcggagatgcctgacggagcctacacaacgtacctgtttcgggaaggcgtcgataaaatcctcaaaaaagtcggtgaggaagccgcagaggttattatcgccgcaaaaaaccgcgaccatgaagaattaaaatgggaagcggcggatttgctgtatcatttgctcgttcttctgcgtgagcagtcgcttcctttggatgacgtgcttgacgtccttgcgaaacgccattctgcatctgagtaaaacaaacctcgcggagagacccgtgaggtttttattctgtcaaacttaaacattcaataaaatattccttatttccgcaaccgtaggcagatgaatttgataatattgactaatagagtttattttggtttttatcaaaaatatacgttttgttcatattccgttcatgcacatccgttatagtataaacagtgatataggaggaaaacatatgccgaataaacaaccaaaaccaaaagggaaattcagctcattcttttcattagtcaaaaaaacaaaaccatcatacggtatgctggccttcgcgctgtctctcagtattgtgacaacgctcgtcagcctgctgattccgctgttgacaaagcagctcgttgacggcttttccgtgtcgtcgctgtcaggcgtgcaaatcggaatcatcgcagccgtgttcatcgtacaggccgcattaagcgcctacgccacctacgccctgaactacagcggccagaaaatcatctcgggactgcgtgatttgttgtggcagaaattaattaaactgcccgtctcttattttgacaaaaacgccacgggagaaacgatcagccgtgtcaccaatgacacaatggtggtaaaagagctgatcacaaacaatatcagcggatttattaccggaatcatttccgttatcgggtcactgacgatcttatttttcatgaactggaagctcacattgctcgtgctgatcgtcgtgccgctggctgcggtgattttagtgccgatcggccggaaaatgtttaaaatttctcgggaaacacaggatgaaacggcgagattcaccggattattaaaccacatcctcccggaaatcaggcttgtaaaagcgtcaaacgctgaagaagcggaatacggacgcggaaaagcaggcatcatggcgctctttaaactcgggctgcgtgaagcgaaggtgcagtcgctcgtaggcccgcttattacacttgtattaatggcggcgctggtcgctgtcatcgggtacggcgggatgcaggtgtcatccggtgaattgacagccggcgcactcgttgcctttatcctgtatttgtttcagatcattatgccgatgggccagatcacttcatttttcacacagcttcaaaaatccgtcggcgcaacggaacggatgattcatattcttgcagaaaaagaagaagatatccaaatcggaaaagccattgaaaacgcggatcagccgattaagctcgaacaagtctcattcggctacaaaacagatcaaaccatcttaaaagacattacggctacgattgaggccggcaaagtcaccgcgatcgtcggaccgagcggcggcgggaaaacaacgttatttaagctgcttgaacgattctacaacccgactgcgggcagcatcctgctcggaaatgaaccgattgatgcgtattcccttgagtcatggcgggagcatatcggctacgtgtcgcaagaaagcccgttaatgtcaggcaccatccgcgacaatatctgctacggattaaaacgcgaggtgactgatgaggaactgaggcaagcggctgacatggcctacgccctgcaatttattgaagacttaccgaagaaatttgaaacagaggtcggtgagcggggaattatgctgtcaggcggacagcgccagcgcatcgccattgccagagcgctccttcgcaacccgagcattctgatgcttgatgaagcgacatcaagtctggacagccaatctgaaaaatgggtgcagcaggcgctggaagttctaatggaaggccgcaccacgatcgtgatcgcccatcgtttatccacggttgtggatgcagatcagcttctctttgtcgaacagggtgaaatcaccggacggggcacacaccatgaattaatggcatcccattcgctgtaccgcgattttgcggagcagcagctgaagctgaatgccgacttagaaaacaaagctgtgtaaagcaagactttatgaatagaaagcagctgaaaaagctgctttttattttgcagccggagttctcttcatagaaagcgggggttaaattatgaaaaaacgcacaaagattttttattggcacgcggccttactgctcgtattcatgactgccgggtgtacggacggtaacgatgaagagccgagccattcttcaagtccggccggagaaagcagcggcatcaacaaggctgaaacagcatcagcggcagaaaaaaaagaaccagtaaacaaagattcacatcacatctctgcggacaaaagcctgtcggcagattattctcctctgcaaattgaatatgcccgcatctggctgcagcttggggaaaatcagcagatagatgaattgaacgttcgccgcattccggccggagcactcgtcaaccctgacgatcatacgagcgcccgctatcccgaagatgttacgcagttagcaggctcccggttagtcgatgggtcagtcacttacagcagcaatggtgacggcaccattcagatatacaatgttcctttgcgctgggagtctcgtgaagatactgatcaaggcgtaatgaaagaagtgacggaggaaatgatccgccatacaaaaaaagtgtctgtcgatacaggagacaatgaaaaaataagatggttaatagacatcatgtcgattcattaaaagaagacaggcaaaaaagcagaaggagggatttttatggctgtcatattggttgcggatgacgaccgccatatccgtgagcttgtccgactcatgatggagcagagcggctttgacgtcgcagaagcggaagacggggaagcggcggtgcggctgatcgaatcagcacctattgatctcatcatactggatgtgatgatgccgaaaatggacgggtttgaagtcagtgaagccgtccgcagctttacggacattccgattttgatgctgacggcaaaaggcgaaacgctggacaaagtgcaaggttttacttccggagcggatgattatctcgtcaaaccgtttgagccgcttgaactggaagcaagggtcaaagcattgctgaaacggtaccggatcaccgctgaaaaactgctgaccatcggaaatgtcacattagataagcaatcccgcaccgtaacgcgcggcggcggagcgggattgacgctgccccggcgtgaatttgagcttttatttaagctcgccggttatccgaataagacgttttcaagagaacaattaatagaagatatttggggctttgattatgaaggtgacgagcggacggttgatgtgcatgttaaaaggctgagggaacggtttccggaaaaggactatccgtttgctatccatacggtgcgggggctcgggtatcggtttgtggtgacagaatgaaacggatcttcagaacggctggaaaaatcatcatccttctcaccgtcaccgcattcttatggctggcggctcatctgatcgttcagggattcggtctcatatggccgattttgcttgtgccgtacgccgagcagattctgacgctctggcttgttttcggcctgctgtttataacgatgtttatcttttcaaagtcagcacgtgaaagacatcatgcgatctgggattcactgaccgccacgatcaagcaaatgtcgagcggcaacttcacagcggccgcctccaggaaaatggagaagattgaacgggaccaccccgtgacgaaattggctgatgaactgtcgacactcgccgcggaactgagtgaaatggaaaagctgaaacaagaatttatttcgaacgtttcccatgaaatccaaaccccgcttacttcattaaagggctacgcgcacctcctgaaaaaaccggatttatcatatgaggagcgggggcgctatttacacatcatcgagacagaaacagaacgattatcaaaaatcagtgaaaatctgctgaagctcactgcgcttgaacgccaaaccgaaccgatacaaaaaaaaccgttccgcattgacaaacagctgcggcgcaccatattgacctgtgagcctgaatggtccgccaaacagattgagtttctcattgatttacaggagtcgtatgtgtacggagatgaagcgctgctcagccaagtatggatgaatctgattcacaatgccgtgaaatttaccggtgaaggcggccgcatttccgttaaaattgttgatctgccgggagcggcggctgtcgaaatcgccgacgacggaatcggaatggagcctgaacaggcggagcgggtatttgaacggttttataaagcggataaggcgagaaacgcagggggaagcgggctcggcctgtccatcgcccaaaaaatcgcagagctgcacggcggttcgatagaggttgagagcaagcgcggcgaaggaacccttttccgcgtcattcttccagccgagcctcgtgaaaaaaacagctaaaatctggtcgaaccagccagtaaaaaacgaagccgatcctgtcttttgaactattgaggcgaaaccgttttatggtatactactgacggtaatacgtataaaacggaggatatttgtgggaaaacacacttctgaacagaaaaagcacgcgcaaattgtccagctgcttcaggatggacaatatttttttcataaaggcttaaaagcatataaagagcggaatttaaaacgggccagcaaactgattcagcgggccgtccatctcgagccgaatgattccgaaatgctgtcacggctggccgtcatttattctgaaatgggccactaccagcagtcaaatgagctgttcgactttattttggtgaacctgaaagaagaaatgcccgagtgtcattattttaaagcgaataatttcgcgcatttggggctctttcaggaagcatacaaagaagcggaggcttattcagatgccgatccggacggggaattcagcgaagagattgaaaatctgatggagcttttggatttcggcgaagcgggtgaaaacgaatcgctctatgaccaggatgagctgctgatcaggcaggaccgggcaaaaacgcttcttgagagcggccagcttcatgaagcggttgtcatgcttgaagagattacggccgattaccccgagctttggtctgcatacaacaacctggcgctcgcttacttttactcaggcaatgttacaaaagcgaaacagacggtattcgaagtgcttgagaaaaatgaaggcaatctccatgccctgtgcaacctccttgtattctgctattacgagagggaagatgaaaaagtcggagaattgagcggaaaactcgccaacgtgtatccgattttattcgaacagcgctataagctgggggcgacgcttgcgcttgtcggcagacatgatctcggttataaatggctccgttctctttacaaaagcgggttcgaaggcgacgaaacgttttattactggcttgccgcctcagcctacgggacaggccgcacagaatttgcggaaaccatttggaaaaaggccgaagccgaatttcccgaatcagaccggcccgcgccttgggcggagcggcaggaaccgctgcctgcttcacttgaacagcggcttgccgcctattatatcagcagcgctgaaggagagcggaaccagcttgaaaaagttctgacggcaaaacgcgccgtttcaccgtttgaacaagatttcgtcagactgctgctttccggtgaaaaaggcgcttcaggcgtctccggtgacgcgctgttcacgtatcggacggtcaagcttctggagaaagcggaagccgacagtttaaaaactgacgtcatgagctgctgggtttttcacgtcattcagcacatccgcgccgccgctgccgtacagaatgagcgggcatgggccgcagccatcgcatacgtatggaaagaagcaaacggcgaaaaaacgacgaaaaaagaaacggccgccgtttacggtataaccccggcaaccctttcgaaatacatcagacaaatagatgatatattagaataaaaccgattctttctatataaagagtcggttcttttttttattataaaggggcaaaacagaactttaccgccgaaaaaagaggtattcatacgtatttttttgctttttgaatcgaaatcaggccgtaatcaccgtttattttgcaaaatatgagatttgcaatcacattgaaatataactgtaataaaaattgtcgaaacatgatggtataatgagtctcgtacataagagattagtttattttacatgtgctgtataatctataccaattaaccagattcaaagaatcgtacataaaaatcatcagcctcacgggcatgtgagggagcgtaactttgatgttcataatagaattccaaatgagaacaggtttaaagtaaaagggaggaaagaaaaagtgaaaaagagtttattaacacttggtttggcttccgtcatcgggacaagcagttttttgatcccgtttacaaaaactgcatcggcggaaacattagacagcaaaaaagcgaaaattgaaagcaagcaatctgaggtggcttcaagccttgaagcaaaagaaagagaattgtccaagcttcaggacaagcaggctaagattgaaaaagaactgaaagacattaacgctaaagcgttggatacaagcaataaaatcgaagataaaaaagctgaaaacgaaaaaacgaaaaagcagatcgctgatttgaaaaaagaaatcaaagaaacagaagcgcgtattgaaaaacgcaatgaaatcctgaaaaaacgcgttcgttctttacaggaaaacggcggttctcaaggatacatagatgtacttttaggggcgacaagcttcggagacttcatttcccgtgcgactgcagtatcttctatcgttgatgcggataaagacctgatcaaacagcaggagcaggataaagcgaaactcgaagacgcagaggctgaacttaacgtgaagctgaaaaaagttcaagatgatcttgcgaaactcgagtctatgcaaaaagacctgaacaaacagcttgatcagaaagacaagcttttcgacgaagcgaaaaacggtcagaaaaaagcggcttccgctatctctgatctgaaaaaagaagcgtcacagcttgcaaaccaaaaagctgacactgaaaaagagcagaagcgcattaaagctgagcaggctgcagcggctgccctgatcaaaaaacaggaagaagcgcaaaaagcttctgaagaccaaaaccaaaaagatgacagccagccggcaccggcggttaaaactgtgaaaaaagcggctgtttcaacatcatctgattcatctgacagctcaagcaaaccgaagagcacttcaggcggatcatctcataacagcggcggttcagatgattctgacggcggatctgttatttcaaattcaggcggtattgaaggcgcgatcagcgtaggatcaagccttgtgggtcaatctccgtataaattcggcggcggacgcactcaatccgatattgacaaccgtatctttgactgctcttcattcgtacgctgggcttatgctaacgcaggcgttaatctcggacctgcaagcggcacaaacacagatacattaatcggaagaggtaaagcagtaagcgcgtctgacatgaaacgcggagacttagtattcttcaacacgtataaaacaaacggccacgtcggcatctacttaggtaacggaacgttcctgaacgataatacatcacacggtgtatccattgattctatgagcaacccttactggaagaaagcattcaacggcaatgtaagacgtgtcgtgcaataatgaataagacaagggccttctatcccggaaggctctttctttatttgtatacccgctcaggagctccctaatcacggtttctcagaaaaatgagcaaaaaaatagcgaattgccctcagatttaataggatatgggtaaggaatacgattgatggggattcttagtcatatagggtgcgccccatttcgaaaaggagtgaatcatggtgtcagaagaaaaaatttatgatgtgatcattatcggcgcgggtccggcggggatgaccgctgctgtttacacatcacgagcgaacttatccacattaatgatcgaaagaggaattccgggcggccagatggccaacacggaggatgttgaaaactatccgggttttgaaagcattctcggccctgaactttctaataaaatgtttgaacatgcgaaaaaattcggtgcggaatatgcgtacggcgatattaaagaaatcgtggacggtaaagaatataaaacggtcaaagccggttcaaaagaatataaagcgcgcgccatcgtcatttctgccggagcggaatacaaaaagatcggcgttcccggcgaaaaagaactgggcggccgcggcgtatcgtactgcgcggtttgtgacggcgcgttctttaaaaataaagagcttgtcgttgtcggcggcggagactccgccgttgaagaaggcgtctatctgacacgcttcgcttcaaaagtcaccatcgttcacagacgtgacaaattgcgtgcgcaaagcattcttcaggcgcgtgcctttgacaatgagaaaattgacttcaaatggaacaaaaccgtaaaagaaatccatgaggaaaacggaaaagtcggcagacttactcttgtggataccgtgacgggagaagaggaagaattcaaagctgacggcgtctttatttatatcggtatgcttccgctttctaaaccgttcgaaaacttgggcatcacaaatgaagaaggctacattgaaacaaatgcccaaatggagacaaaagtcccaggcattttcgccgcgggagacatccgtgaaaaaacgctccgccagatcgtaacggcgacaggcgacggaagtattgcggctcaaagcgttcagcattatgtggaagagcttgaggaaacgctcaaaaccgttaaataatcactgtaatgttcagtttttgaatcgttactgtgttttaattacgctgtaacacgggtgaaatactgatgttttaagatgaatgtagtaattgaccccctttttaatgaatacactttggcacggattccagtatccgtgccctttttttgcgattttttgttttctgtcaaataaaagaaaaggatgtcggtgtctctgcattgtgagagacatgccgaaacggtataatgaagagacgatgatttgttgagaaggttaggtgacgtacttgtgcaaagagtgacaaattgtgtgctgcagacagatgatcaggttctccttctccaaaagccgagacggggctggtgggtcgcgcccggcgggaagatggaaagcggcgaatccgtcagagattccgtcatcagagagtacagagaagagacgggcatttatatactaaatccgcagttaaaaggcgtgtttacctttattattaaggaacaggaacaaatcgtgtcagagtggatgatgtttactttcgtcgccgactcctacacggggcggaatgtcgctgaatcagaggaaggcgttctgaagtggcatgacgtaaaagatatccacagccttccgatggcccccggagacgggcatatccttgattttatgatcaagggccaagggcttttgcacggcacctttacgtatacgccggacttcgagctgctcagctatcgtttagatccgcagcttatcaaataaaagaaagaccgcaggggggagaaagatgagtatgaatgaaaaccatgatattcagctcgtcatcattacgggaatgtctggagcggggaaaaccgtcgccattcaaagctttgaggatctcggctatttttgcgtcgacaatctgccgccttccttgctgccgaaatttttggagctgatgaaagaatcaagttcaaaaatgagcaaggtcgcgcttgtcatggatctgcggggacgtgaattttttgacaggctgattgaggcgctggatgaaatggcggaaaatccgtggattacaccgcgcattctctttttagacgctaaggattccatccttgtgacgagatacaaagaaacgaggcgttctcacccgctggccgctaccgggcttcctcttgaaggaatcgcgctggaacgccagctgcttgaagaattgaaagggcgctctcagctgatctatgacacatcggatatgaaaccgcgtgatctgcgtgaaaaaatcgtggcgcatttcgccacgaaccaaggtgaaacatttacagtgaacgtgatgtcattcggtttcaaatacgggcttccgatagatgccgacctcgtgtttgatgtaaggtttctgccgaatccattctacattgaaagcatgaggccgcttacggggaaagatgaggaagtgtcatcctatgtgatgaagtggaacgaaacacaaaagtttattgaaaagcttgttgatctgctcggctttatgcttccgtcttataagcgggaaggtaaaagccagcttgtcatcgcgatcggctgtacgggcggccagcaccgctccgtcacgctcgctgagtatttggctgactattttaaaaaagatttctatactcatgtcactcaccgggacattgaaaagagaagccggaaatgaataagaagccgaaaatcgcaatcttcggcggcggaacgggtctgtccgtgctgcttcgggggttaaagcataagcccgttgatattacggcgattgtgacagttgctgatgacggcggaagttcaggccgtctgcgggatgaacttcaaattccgccgccgggtgacatccgtaacgtactggctgctttgtcagatgttgagccgctcgttgaaaatctgtttcagcaccgtttcaacaaaggaagcgacttaaccggacattcgctcggcaatttgattttggcagcgatgacaaatataaccggtgatttctttcacgctgtcaccgaaatgagcaaggtgctgaatgtccgcggcagagtgctgccggctgccaacaccagtgtcgttcttcacgctgaaatggaggacgggcaggtcgtctccggagaatcgacaatcccttcttacggccagcgaattaaacgggtgtttcttacgcctgaaaaaattgatccgctgccggaaacgattgacgtcatccgtcaggccgatttaatcattatcggtccgggaagcctgtacacaagcattcttccgaatctgctcgtgccgaaaatcggagaggaagtcgtcaaggccgcggccaaaaaagtatatatatgcaacgtcatgacacagcccggcgagacgcttcaatacagcgcggccgaccatgtcaaggcgctgaacgatcatatggagcagccgtttatcgacacgatcttaatcaacaatgaggagatccctgacgaaatcaaaagcaaatatgcgaaagagctggcccggcccgtcgacttcaatgttgaaaagctgaaatccatggggcttgaggtcatcagggatcagattatcacgtataaaaatggcgtaatccgtcacgatacacataaagtggcttctcttcttgtcgatttattaagggactagaggccttttgaaatgaggtggctaatatgtcatttgcatcggaaacaaaaaaagaactgacgaatctggaagtgaaggactgctgcgccaaggcggagctgtccgcgctgattcggatgaacggttccctgtcattttcaaaccgccatctcgtgcttgacgttcaaaccgaaaatgcggcgattgcccgccgcatttatacattgctgaagaaacaatatgatgtatcggtcgaactgttagtcagaaaaaaaatgcggctgaaaaaaaataatgtttatattgtgcgcttttctgaaaatgcaaagctgattttagaggaattgaaaatcctcggggagaactttgtatttgaacggaatatttctgaggaactggtggcgaaacggtgctgcaaacgttcttatatgagaggggcgtttttggcgggaggatctgtgaataatcccgaaacatcgtcgtaccacttggaaatcttctcgctttataaggaacataacgattcattatgcgccctgctgaatgattttcatctgaacagcaaaacgcttgaacggaaaaaaggctatattacgtatttaaaagaggcggaaaaaatcactgaatttctgaatgtcatcggcgctcacaattcactgctgcgctttgaagatgtgcggattgtcagagatatgagaaactcagtgaaccgcctcgtcaattgtgaaacagcaaacttaaacaaaaccatcggggcttctctcagacaggtggaaaatattaaatacattgatgaacggatcggtcttgaagcgctgccggaaaagcttcgcgaaattgcgcagctgcggattgattatcaggaggtcacgctgaaagaactgggggaaatggttgcaagcgggaaaatcagcaaatccggcatcaatcacaggctgagaaagctcgatgaaatcgcagaacagctgcgtacaggacaaagcatcactttgaaataaccgtacagaaaaggggagatcttatggttcaggggaaagtggaagtgcgtttaaagacgggattgcaggcgcgccccgctgcattgtttgtacaggaggcaaatcgttttgcatcagatgtgtttcttgagaaaaacggcaagaaagtgaatgccaaaagcattatgggattaatgagtctggcggtcagtacggggacggaagtcactctgatcgctgaaggcgacgatgaaaaggaagcgctggaaaagttgtccgcttatgtgcaggaagaagtgtaaacactttgtaagggggacggaacgatgaatgagtttctgaaagattgttatcaaacgataggctgggaaaaggattccctcgatttcagcaacctgccggagtttttaaaggcgctcgcgtatcggtttccgtttgaaaaccgcgccgttttgtccaaaaaagaatatgacgtcacgaaagaaggactgtggcggcacatggtgaaggaacctcacggcggtctttgttatgacttgaacggactgctttatttcatcctgaaagatgccggatttgatgtcaaattgatccgcggaacggtctggaaaaacggctgggcgctgcccggcacacatgcggccgtacttctttccgccgggggaaatgagtacatcgctgatgcaggcttcggcctcaatctcgccatgcagcctgtgccgatgtcgggagacgagacggtatcagcggccggagcgttccgcgtgaggatagaagagacggaattcgggacatacgtgcttgaaatgaacaaaggggacggctggcagacaggctacgcattttcgcttgaagaaatcgatgaaaaggacctcaagtctatgaaacaaacaatctttgaacatgaacgttctcctttcaacaaacgcctgcttgcttctaagcggacaccggaagggcacatggttctgtctgaacgcaatataacaataaaaaaacacgatggcacggcggaaaacagcagaatagaccgctcagagtttgaagaaaaatttactgctcattttatatgaagcttgcagattctctgcaaaaaaacggcctccgcagggaagccgttttttgtatgtgtttatctcatttttgtaaaggtttgatagtggtctgtcgtcttataaatcagccagtcgcttgagtaaagaatccggtctgaatttctgaagcctgatgtatagttaatatccgcttcacgccacgtccgtccgctttttacagggagtttgccttccctgtttgagaagatgtccccgccgatgcttttccccggggcgacgtccgccagattcccctttgatgccacccagccgagggcctgtgcttctgattttgtaatgtagttatcaggaagcttgtgataggtctgaagataatccgcaaccccgtcaaacgtgttgataacctgtgcttcagtgtgcgccttgtgagaagatgtatccgtcttggcagccgttgaaaacagcatccccgccgcggagaacagcaccagcaaacaaacggaaatccacgataatcgttttttcaaagcaatacctcccatttttatcatgtgaagctgattccttttcattgtatcagcatcaagagaaaggaatagaaagaattttaaaatagtacttttgatctagcgaaaaataaaccccggctgaaacggccgggatttttcatctcattgaaattccttcgtgaggtttttcggtgtttttccgtatacggcgtcaatcatgttctgtgcggcttgcttgaacatattcaagcggatttttgcggttgctgacccgatatgcggaagcaatgtgacgttttccagctgcaggagcggattatcttcggcgatcggctctttttcaaacacatctaaaccggcgccttttatccagccctcttgcaatgcgcggatgagcgctttctcatcaactgtctttccccgggaaatattgacgaaacatgccgtatctttcatcaatttaaattccctctctcccatcatatgatatgtttcgtcagtaagcggggtaattaaaagcacaaagtctgatgttttcagcagtgtatctaagtcggtatatgtaaccccgagttccttctcggcatccggttttctgctgcggttataatacagcacgtccatatcgaagccgaattttgcccgtttggcagcttgttcaccgattctgcccatgccgataattcctaatgtctgatggtggacatccataccgaaaagagattcctcctcaacggttccccatttgccggcgcggacgaatcgatccaattcggcaacccgtctggcggaagacagaattaatgaaaaagccagatcagcgacagtgtcatctaaggtgtacggtgtatgcgtgccgacaaccccgcgccttttcatttctttaatattaaaattatcatagccgactgaattattgctgacgaccttcagcttcggcgcgtgatccagcaaatcactgtcaatcgccgttccggatgtcagcagcccttcagcatctttcattttttcgtacagtttctcttttggaatggtatcttctttccagatgtcatagcggcaatgctcgtctatcatttgttcgacttcgggcggtatcggtttcgcgatgaatacatagggtttcaacgggcttctcctcctttgtctttcttctctattttattatataagagaagcggtaacgtgagaaataatcaaacgcattacgataaatttctggttcttttgaacttaaaatgaaagaaaaaggaatgtacatgcttgatttctccaaacaataacagaatccgcctatatttctgaaggcaaaatgagcggaaccgctgttttcaaaagctttataggttggtgtaaagataaattttattatttttgaaagatataaatgaatataatctgaatttacagtcaaattatcgtgtctttttttgaaagcgcttttgaggcctttttctgtgctataattccttactgtaagctgggtaagaaggcttgcaatacaatcggatgggagatgaatagaaaaatggtttctttatcaagcattttggagcacaaccagcagtttgtccaagaaaggaaatatgaaccttaccaaacgacaaaattcccgaaaaaaaagcttgtcatcgtatcctgtatggatacaaggctgacggagcttctgccgcaggcgatgggactcagaaacggcgatgccaaaatcataaaaaacgcgggagccattgtttctcacccatttggaagtgtcatgcggagcattttggttgccgtttatgaactgcaggcagaggaagtctgcatcataggtcaccgcgagtgcggaatgtcgggattaaatgcggcttccatattaaataaagcaaaagagcgcggggtggaggacaaatgtctcagccttctgcagcatgcgggagtcgatttggaaacatggctgaccggttttcacagcgtcgaagaaagcgtggcccacagcgtgaatatggtcaggcatcatccgctcttgcctgaagaggtgccggtgcacgggctggtgatcgatccgggaacggggacgctggatgtagtcgttgacggttatgaaacagtcaaaggaggatgcagctgacgatgcaatttaccggcagatatcagggatacaatttgcagaaatttcagaaagacctaatcgcgggaattgtggtcggaattgtagcgattccactggggatggcctttgccatcgcctcgggggtcggtccggaatacgggctttacaccgttattgtggccggaattctgatttcgctgttgggcggctctaaatatcagatcggcgggcctacaggggcgtttgttcccattttatttgccattgtgatgcagtatggttttgagaatttacttgtagccggttttatggcaggcgtcatgctcgtcctgtttggcgtatttaagctcggaaagattatgaaattcgtgccgaagccggtgatcgtcggatttacggccgggatcgcggtgctgattttctcggagcagattgcccattttctcggtctgcgcgatatccaaaagcatgaaagctttatcctcaacattgcggaaataggcaagaagatcggaacctttaatttgtacagcatcctcatcgcgggaattgctttggccattttgctgttatcagccaggctgatgccgaagattcccggcgcgcttgtggccctgcttgtctctacagccgctgcggtcgtgttttttcctgacaaaatggcgacaatcggttctgcttacggagaaattccgcggcagcttccggctttccagcttccggatttctcaattgataacatggtgatgatgtttccctcggctctgatcattgcgcttctcggcggacttgaatccatattatcggcgatggtcgcggacaatatgaaaggatcacggcatgacagcaatagggagcttgtcgggcagggcatcgccaatatggcagcgccgcttttcggcggcataccggcaacgggagcgattgcgcggaccgcaacaaatattaaaaacggcgcagtttctccgatttccggtgttgtccacggagtcaccgtcctcctcgtcctgctcgtcttcgccccgcttgccgttcacgtaccgctggcaagcatggcgccggtattgatggttgtggcttggaacatgagtgagcggagggaagtcgccaatatgatgcggctgaaaaacactgattcattcgtactggcggcaacctttttgctgacggttctgtttgatttaattatcggcgtttctgccggtcttgtgctcgcttttgttttctttatcagaaaaatgagcgaatcaacaagcattaaaacaccgcatgccgcggtcaaatcggttaaaaatgattcgtccgtcagcacatattccattgaagggccgctgtttttcggttcaattgattcactggaatcatcgctgctggagaggcttcaggaaaagccgaagacgcttattctgctgatgaataatgtgcattacatggatacctccgcagaagcggtgctggggaatgtgatgaaccggatcaaacggcataacgggagattgatgatcgtcggattgcaatcacagccgagagagctgatccggaagacggggctgtttcataaaatcgggaaacagcatttctttgagcatcaggacgagataacgggataaattcagatacggcctgtccatgaaaaagcggacgggccgtgtttttattcggtttcaaagcgcttgatcagtttttcctgatgggctttcatcgcatcttctaacgtgattccgtacttatcggcaaggatagccagatttccgaggacgtcacccatttcttcaatcagctcctgcctgcgttcagcctgggttgcgtccttttcatccggccggtctctgccgatttcatatgctcttaccgcccgggcgagctcacccgcttcttccattaaaaagccgattctgataaatggcccgtacgccgtccatcctcgtttttcgtaaaaatctttcgtccattgttctgcttcagccatctgcatgtgaaacactccttatgtcctgtatgattcttattgatattatcatatagagatgggacaatatatagtgtattttgatttattgatgtacatatatagatgcggagatgaaaaaatgaaaaccatttgtgtatttgcggggtcaaacccgggggtaaatgaagagtacaaacgcaaagcggccgaactgggtgaatatatggcggagcagggaatcggccttgtttacggcggttcacgggtcggtctgatgggaaccgtcgctgatgcgttaatggcaggcggcggaaaagctgtcggcgtcatgccgagcgggcttttcagcggagagattgttcatcagaatctgacggagctgattgaagtcagcggcatgcatgagcggaaagcgaaaatgagtgaacttgccgacgggtacattgccatgcccggcggtttcggaacatatgaagagttatttgaagtgctgtgctgggcgcaaatcggcattcatcaaaaaccgatcggactgtacaatgtgaacgggtattttgagccgatgatgaagatggtcaagtacagcatccaggaaggattttcgaatgagtctcatttaaagctgatacatagttcctcccggccggatgagctgattgagcagatgaatcggtatacatacccgattttagataagaaatggcgtgaattgtaaggcagcggtctgaaatatgtttcggcggctgcatctaattcattctgacggaaagttcttttctccttctcatgcgtaccacgcctttcttcgtaataagagatatgtctgagaataagaggcgaatgagactgctgttggggttgaaagaagaacatccatttcctcagaggagatggatgttttgcggtttccagactgtatgcgtttacaacttttgttgcacgaaagtttcttccgatatgaaatcatcctgctgcatcttttgtttttttgaaccgattccaaatataccgactgtcagtgcacaaagaaaccagcagcctgtaaagaataagaaaacacttaaaaatccgtagcctgaatacaggaaactgacgacaaagggaccggctacatttgcaaggcgtcctacgccgtaagtgaggccatttccagatgccctggcttcaaccggatataattccggcgtataagcatatgcgatcgaactgaaagtacgctcaaacatatgcatgagaaatccgcatacgataatgaccatcggcaaaggattgatgccgtaaaagaatccaagcgccataataattaacgataaaacagaaatggcccactttcgatccacacggtcagagatttgcgccgcaatgagagcgcccagcggggcaccgatcgttcccagagtgacgtatacgatagactcatccattgatacgccttctttcaccagaagggtgggaacccacgtgccaaagccttgaattgcaatggtggaagctgcccacatcgtcattaaaacaaaagttcttcctgctaaaggcttttgaaacagcgtccgatatggaacggattttacagcggtttgtctgctttgcagagccggagctggttcaggcagttcacccttttcattttctgcttttgcctccagttcaagcagaatgcggtgtgcttgttcgctttttcctttcgtgtccagccatttcggtgattcttccagttttctggcgatcagcggaaaaaaaataccgaccgcgccgaatagaaagacaaaccgccagccgtaagaggcggacggcacgaccaatttagccacccagccggccgcaggaattccgcatatgccgattgtaatacagattgcctggtatttgcctttagttgcggatgggaaaaattcgctgatatacgtactcgccacaatcgttgtggcgccgatacctaaactcgtaaaaaatctaaaaacaccgagtatttctgggttccaagccagagaagagaggagggagaaggaagagaaaaaggtgacaaccagaattaaaccttttttccttccgaaacggtctgaaaaccatcctccggcagaggcgccgataaacattccgaaataggagacagatgtaataaaagcgatagtatgagtggatatgttccattcctttaaaagtgaaggcgccgcatatgaaaacgtatttaaatcgataaaatcaaaaaagtaagcgaatgaaaggataacgagcactgcttgatgggcccttgaaaaaggcagtctgtttaatcgattagacgcatttacattgatcatctcgtattcctccgtttatctttgacttgtctgaagacggtattaaccaatgtgattgagcgtattcatgctgtaactttgtttagtaaacacatagccttcagagatttttcttgctgtgcgtactactttaatcgttgttccatccggatcaacatctgcctcggtttttaaaataccgcttggatgccccaatcggatcgttctcccggagaatgaaaattcagataatattgtatcttgcaatagcatgccggcagtcgtacataccgcccctgtaatggctaaagcttgatgcggtttttgcatggacatcatacgaatgacaagatccatctcttctgcgtgtctctttatcccttttgtatcgatataatccgctggagatgagattaatgtcagttttggtacggccggtgattttgcagcagcctcatgtctcggagcgaatctgcatttctcggctgcaatcgatcggatcatttcgagcttttccaatatatccggggtatattcatccggaagttctaagccggtaagccccgtgtcctctgcttttacaaagacaagcggattggcgtaatcaataatcgataccgagatatttccatacggggtatcgagaacatcaataggctgaccggtgggaaacagcttaccggtcaccgctccttcagcctggtgaaatgaaagataaataggagaagctgtacctggaacccccggaatagagcagtccccctggtaatgaaatgttccatttctgacttcgacttctgctgcgatcactttttgagtgtttgtatttaaaattctgacttttgtaaccggctcttcagcttgaacgagccctttctcaatagcataagggcctacggcagaagagatatttccgcaattgcctttgaagtcggtaaatttgtcagtcagactgacctgagcaaacgtatactcaacatctgcatcctttctggcggatttcttaataatggctgccttgcttgtgagagaatggccgccgccgagaccgtcaatttgtctctcgtcagggctccccataatgtctaaaagaaaatcgctccataggtttgtatcgtctggcatgtctttttgaagaataaaaacgcctttgctggtgccgcctctcataacggttacaggaactttttccatgctgtctcatccttacatcattttgtgtggataaaaaggtaccggtccctttggaagatatcgtatgataaataaggattataagtaaaacatataatttttataaagttaaataaaaaacttttataataggagaaaattttatagcagaaaaatattttgggggatttcatatggatgaaaaggattggattgtgctcattacattattcgaagaaaaaaatatgacgaaggcggcagagcgattatatatgacacagccggcgttaagttatcggctcaaaaacctggaagcacaattcggagtgcgccttttttataaaagaaaaaaagggatggagttcacttcagaaggtgaacatctggttgattattcgaaagagatgctgcaggagttcagaagagtgaaggatgatatgctcaatatgagccatgaagtcagcggggttctcagattaggagtctcaagcaattttgctcagtataagctcccggcgattctaaaacggttttctgatcagtatccgtctgttcaattccacgtcaatacgggatggagtgcgaaggtgatggatctgcttcatcattcgggggtacaccttgggattatgagggggaattatgattggcaaggagaaaaacaactgctgaatgaagagaggctgtaccttatttcaaaaactgaaatcaacagtgaggaccttcccaaattgccgatgatttattatcaaactgatgcttctttgaaaagtttgattcaaaaatggtggaataaccaatttactgaaccgcctttcattgcaatggaggtagacaggcaggaaacctgtaaagagatggtgaaaaacggcctcggttattctgttgtgccggaaatctgtcttcagccttctgatgaattatacacattggcgctatcctataaaaataatgaacctgtgatacgcgatacttggctcatgtatgattcttcagcgttagaattatctgtcgtcaaagcattcattacttttttgaatgggaataaagcataaaaaaacctgcaagagacatcatctcttgcaggttttttgggcattacttctggtcttccgtattgcgtgtcagcactttatcgattaagccgtattctaaagcttcatcagctgatttgaagttgtcgcggtctgtatcgcgctcaatgacttcaagcggctggccggtacgttcagcaagcactttgtttaatttgtcgcgaagcaagagaatgcgttttgcggcgatttcaatttctgtcgcctgtccttgcgctccgccaagcggctggtgaatcataacttcactgttaggaagcgcgtaacgtttgcctttttctccggctgcaagtaaaaatgctcccatagaagcggccataccgatgcagatcgtggatactttcggtttaatgaactgcattgtatcatagattgccataccggcagtgattgatccgccagggctgttaatgtaaatggaaatatctttttcagggtcttccgcttcaaggaataaaagctgtgacacgatggagttcgcaacgttgtcatcaatcgcagatccaagcatgataatacggtccttcaaaagacgggagtaaatgtcataagctctttctccgcggttcgtttgttcaatgactgtaggtattaaattcataatgctcctccttcaccttttaggtaagtatgtatttacatgatacatttttggtcaataaaggtcaaacaaaacgctgaccaaaatgccaaccttttcttctaacaccatttttcccataaaacaaaaagttcaaacagcaaagtgaaaatgaggatgatcagcgccggagccttgagaaaatgatatggccggagcgctcaaaatagaccgcagtcgcgtcggtacatacggctgaacggtctgactacgttgtccgtccttccaaaagccgtaccggcaaatacgtttccagcggcaaatcatcaaattcgccttcaatttcttttgctaaaatctcgatggctgttttggaaatcaattcgatcggctgctggatggttgtcaagtccggcagaaccgattgaacggtttcagtgccgtcataaccgatcacttttaattgattcgggaggtctttcccccgttttttagcctcggtcatcacggcagccgccatgatatcatcgctggcaaaaattccgtcggtgtcaggctgttcatcgaataatgttgaaataatatcatggtaatgctgataaaagggtacttcatatgtaataggcttccgtccgtgttcatgcatgacgtcttcgtatgcttttcttctgaggtttgccggtgtttcgagttcaatcgggccgttgagatggacgatgtgccggcaccctttttcaatcagcagttcagccgccttttttccgccgtcatagttgtctgagccgacgacgggaatcgtgtccgataagtaatgatcaatggcgacaatcggcagattctgcttgtgataattgagaattccccggttataagtcacggcgatcacgccgtccacttggtttcttatcagcatctccaaatatttttcttccttatcctttcgatgtaaactgttgcaaagcagcagtttgtagcccatggacgtacaaatgctttcaatatgaaaggcgagttcgccgaaaaacgggttgctggagtttgggatgataagtcctattaaattggttcgttttcggaataaagagcgggccagatcgtttggaaagtaattgatttcttccatcgccttgtacactttttcttttgttttttcgctgatatagccgcggttatttaatacccgcgaaacggttgtagatgaaactcccgctattttcgcaacatcatgaatgttaggcttcattcccgtgccctcctgcatactgaaatggcttacaatttccgtcacgcacttattttagagaatcaggctgacatgtgcaaggacattccatgtttctgttttcatataaagagggtgcgttttgtttgattggaataatcagaaaatcatatgtcaaccgattgacatatgaaaccggttgacatacaattctttttgaaagcgctttatttacggagtgaagggaagtgacgggtatggagagatggctggcggcaataaagtgaaagaatcaagcagcggcggaaagtaagcgcttactcggagctcgcatgtatgtgatgaatatgaagaaggaagtatgcggctcaaaatgactattaaaaggtcctattaaaggagcggtgcaaatgaaaagctcaaaaagtctgtattggaaactgagtgcttatttcttctttttcttttttacttggtcttccagctattctttatttgcgatttggttagggcaggaaatcaatttaaacggatcagcgacaggcattatcttttctgtaaacgccgtatttgccctgtgcatgcagcctctttacggttttatctctgacaaattggggctgaagaaaaagatattgtttatgatcagctgtcttctcatattcacgggtccgttttatatctacgtctatgggccgcttttacaatacaacgtctttcttggcgccgttgtcggaggcttatatttgggagccgcttttttggcgggaataggcgcgattgaaacgtacattgaaaaggtcagccgtaagtatgatttcgagtatggaaaatcaagaatgtggggctcgctgggctgggcggcggctgcattttttgcagggcagcttttcaatatcaatcccaatatcaacttctggatcgcgtctgtttcagccgtcatattaacggccattatcatgtccgtgaaaatagaaatgaccgatcatgagaaaaacagagcggaatcggtccggttaaaagatgtggggcggctctttttattaaaagatttctggttttttatgatgtacattatcggggtgacttgcatttacggcgtttatgatcagcagttcccgatctactatgcgtctttgtttccttcagtgtcgatgggtaaccaagtattcggctatctgaattcattccaggtgtttttggaggccggcatgatgtttcttgcgccttttatcgtcaataagttcggagcgaaaaacagtttgattttagcggggtttttaatggctttccgcatcgtcgggtccggaattgcagttgagcctgtaggcatttcatcaatgaaactcatccacgcactggaattgccgattatgctgatcgccgtttttaaatatttggccgccaattttgatacgcgtctgtcgtccgtcctttatctcgtcggttttcaattcgcatctcaggcaggcgcgtcgattctgtcgccgcttgcgggaggattatatgacagtgcggggttccgtcaaacctatctcatcatgggattcgtcgtctttggttttaccgtcatctccatatttactttattgggcccgaaacaaaacagcaggcgtgtccagcgtctgcaaaaaatcggatagagaggatgttacaaatggacagaattcagcaggcggaagaagctttgaaggaagccgagggtaaagtgaaacaaagatatcgattggggtatcatattatgccgcgggcgaattggatcaatgatccgaacgggcttattcagtttaaaggagaataccacgtcttttttcagcatcatccgtatgatgagcattgggggccgatgcattggggacatgtaaaaagtaaagatctcattcattgggagcacctgccggttgccttagctccgggggacgaattcgatcaaagcggctgtttttcgggaagcgcggtcgatgatcatggaagattagcccttatctatacaggacataatataattgatcaagagaaagacctattctatcagactcaaaatatcgctgtcagccaagatggaaccgtgtttgaaaagcttcaggaaaaccctgttattacggaaccgccggaagacagcgcccgtcatttccgcgatccgaaagtatggaagcatcgcgatgtttggtatatggtcatcggcaactcttcaaaagaaaacgtcggacgggtcgttttataccgttcacctgatttgcgtgattgggaatacgcgggggttctcgcccaaagtgacggtaatctcggttatatgtgggaatgtcctgatttctttgaattaggcggcaaacatgtcctgctgatttcgccccagggtatcgaggcggacggcgattcatataacaatttacatcaaaccggctatttaatcggtgactataataatgaaacaaacaaatttacacacggcgcttttaaagaactggatcacggccatgacttttacgccgtgcaaacattattagatgataaaggacgcagaattgccatcggctggatggatatgtgggaatctgagatgccgacaaaagcggacggatggtgcggtgcactgactttgccgcgggaactgactttgcgtgatgatcataaacttttgatgaatcccgtggaagaaaccaagcagctgcggaaaatggaatatcgggaatgtgccggacgatcggtttcagggagttacttggcaaagacgcccgaagacctgcttgaagtccgagccgtgtttgatgtaaacgattctgatgccgaaacggcaggttttaagattcgcggccttgacgaagaagaacttgtgctgacatacaatctaacggataaaaagctgacacttgattgcaccaagatggggaaagacggtgtgagaagggtgcggctggatgcaaacggcaagctggcgctgcgtatctttattgacagatcctcgattgaagtattcgccaatcatggagaaacaacgatgacaagccgtatctatccgaatgaaggcagattggggattgagctgttttctgagaaaggcgccgtaaaggttgaggaattcacctattggacgttaaaggacatttggaaaaaaagctgaaacgggtgattatcgctttttctgaagcggctggaaatgtaccgagccgagggcagtccgcctgaaatacattttttgtgaaaatcaatgccgttaaacgatgcaggattatgcagcgtcctcgtgcagcataatcctgttgtgtataatcaaaaaagagttgctttctgtgcgtttctttattataatataaaggtatctgattgaaaaaacgtgcgctcgtagctcagttggatagagcggtggtttccggtaccacgtctgtcgggggttcgaatccctccgagcgcgtctcagttaagacgataggaaaaacctcgcagatgataaatctgcgaggtttttattttatcttgttttgaaactgttaatgaatgtgtctctgttatgttcggtgccggcaatcagccgcgcactttcactgatccgctgcgcaagagctttttgcgccttgccttcaaagctgttcaatagtgctgaatacacttcatataattcatctttcaatgtgtccatttcgaatgtcggtttcagcgtttggcgcactgtttccagttttgtccccgctgcctgcgtcatggcggttttcagcatctgccgctgcagccttttcttcatcgggtcgtccttgtgttctaaaagttcgtctaatgtcggcattatgtatccacctctatcatcttaaccagtttgcgagcatctggtctttttcctgaaattcgtccgctattttatgtaagaatccgccgatctcttcaaggtccgtgatcgccgcctgcaaagaatcaataaacgcctgctcagcctgtgtgtcgtaaaaaatcggtcctttatcgtaggattgcgcaatatcttcaattgtattggtcacgtcctgtgcttgaagctgatcaaacaagccgtgtccgacttggccgtaaaattccgttttcagctcggcgattttttcatcgtgctcctgataggcgttctgcgcttcttttttcatcgtccgcaaatcctcagtcatggcctgcaccttttcagccagcttctttgcgtttttcggcgttacttttatcgcgtctccgcttccgatcgcaccggccggcagaagagcgccgagatttttatcgaagactaactcatctccgttcggatttgtgatgtttccgtttcggtcaaatatgaaattcgcttcatttaagccgtgtgtatccggatttctcagaatgacggtagtaaagaaataagcgagatttttgccgatctgctcgttcaagttcccatcaagccgctgcttccggctgaactgtgagagtgaggggtttttcgtataaatcgttgtcccgttgtggcggtcatattcgttccaataacccgccccgaccatgtcgtccggattgataattgaccggatgtaaggatcgtatatgccgctgttgatgtctttctgtgtttcctcatcgtgcagtttcacgacggaagggctgttaaacgcgacggcgtacacatcattattcaccgcgctgtattcggcctcagcgccgccgagtgaatggccggttgttgaaataatcgttgatgttccggcatactttttctttacgctgcgtaccagctgatcggcttgatcgatttgcgatgttttcgttatcagcttatactttccggttgtgagcatggcgtcttgagagggcgttccattatattttccgagtgttttcgaggtatcctccgcgtctttttttacaatataatacacttctttttgcggatcattaccgaaaacaatattgccgccgtccgcttttacgccgtcattgatcgggtcttttccgatatcggttcccgcaaaagcgacgaccacgttttcggggttttttgattttatccattttccgtttttggacttgatgccttttgagaatacaaaggcatcaagacccgtatcagaatcctgcttcactttctcaacgtaccaatatgacgtcttacttattttataaggagttttatatttcatatgcagggctaacattttataattgtaagctgcttgactcaaacggtaatattctttatctgtgacatcagagacggttatttcttttccttttggcatatatacatcacctttcttatattgtaaaatagttccgaaaggatgatacgcatgagaaaatacattattatcctaattgttataattatagcagtgggaggttttttcgtgaagcatcaatatgataaacataaaaacgaagaaaaacttgtgattgaggcgcaagatcatatgaggaattacttaaaaaaagactataaaaatgtacaggaagttcacttttcaaaagactacaatatcgatccgacaggcggagttgaagtttcaggctacataaataataataaagaaaaagaattttccggtatatatgatccaacgaacaaggagataggtatttcagtggtcaatgccgaagaaaggtaaaatacccacctcaggatgagtgggtatttattttgtttaattatcttacaaaattcgtgatatgtttctcatacagttcaaacctattcctgagatcaatcgcctctaccgtctcatttgtcgaggtatccccgatattaacggtaaacgcgtacaaatatcatgacaactcaacgacaggaaaacgtcagatcagcattttactcgctttaagttccaatcttaacttgtcagcaacaatcgcgatgaattctgaattggttagctttgcttttgacatgctgaaagtatattcatatcaagttttcgctcatttcgtttacttaagaacgacagttatttataggaagggtttgatttccaaatgaaaaagaaaaagtacataattatccttattttaataattatagcagttgggggactttttatgaagcatcagtatgatcagaaggaaaaagagattgcgttattcgaagaagcccagaatcatatggaaaagtttttaacaatgaactataaaaatgtggataatatccatttttccgatgattaccatattaatccaatgggtggtattagtattaagggttatacgaatggaaaaaaagagtttgaaggtctatatgatccaggcaataaagaaatattatcatatacggttgatgccgaacccaaagaagaatgtaaagataagctttgtacaagataaattagccagctcaatcgagctgagctaattttgttttattgctcttactctatctcctcgacataaaacaaatcttccataggtacatttaatcctcagttaataatgaatagtgttgtgatatcatatcttgtatttgttttaaatctgcttatcgcagcctcagtagaaccaactaaatcagccaattccttctggatttgaattcctttctccttcatcacttcatttaacctagatctaactataactaacgcttataaaaaagtattctcgatcactgatacttgatacgttgatgttttttagacatgtacaacaccccgaggttgatataaatttaatctaagaaaggatgagtttgtgaagagatgcaaaattgccctaatatttgtgataactatagcgtcaggaagtatctacatgaagtaccaccatgattaaaaagaagcagaacaagaactttttatccaagcgaaaaataaaatggaaagttatataaaagctaattacaaaaatataaagcggattacatacattaacaattataaaataaatcctatgggtggtatttccttgaaggggtacttgaatggtaataaggaaaaagaatttttcggactttatgacaaaacgaatgatgaaataggagtttcgtcagtcgatgcagaagagaaacccgaatgtcaggaaaaagaatgtgaatactaaaaagacgctggaataaagaagtactctggattgccgcttatatgatcctctgcggacattaaagaaaaatcttaagaccctaaatgcatcggatgtcaccaccatttttccattccgcgagcttcatcataactgatgggacggatgattctgtgaaaaaatatattattatcttcattatcttaatagcagccggaggttttataatgaagagtatgaatgataaaaatgttcaggctgaagagataaagattgctcaagaacgaatggagaaatttatcaaagcgaattatgaaggcatacataacgttacatttaaagataaatatgaaacagatccaatgggcgggatagaggtatttggctattacaacgatgatacatcaaataaatttgacggtatttatgataaagcaaatgacaagattatgggacacactatagatgctgtgagaaagaaagaatgcagagataaagattgtgattactaagaagacgctcgtctgcgtttttttatagatgagcttaatgaaaaagacaagggtttcggcatgtgccgcccttgtcttttttattgaacactgtaaaacataaccggaaacagctcattatttgacagtccattttaacagcgttacaattaatcatgtaaatagttacatgtttaaacaaacatattgtctcgggaggtgatacgtccttgaatgaaccttctttaaaaaagtcatttatgagtcagtgaaacgcatcattgatcccgagcacgtgtatttccgcactgtgcctgtgtttgaaacaagcaatgaggcatatcagcatctgcaggaccggctgtttatcggggctgcggtcagattgccggatgacattcggttagatatttatgaaattcaataataagatggagagtgagtcaacatggaaaactttatcggaagccatatgatttacacgtatgaaaacggctgggagtatgaaatctatattaaaaatgatcatacgatcgactatcggattcatagcggaatggtaggcggccgttgggtgcgcgaccaggaagtgaatatcgtcaagctgacagaaggcgtatacaaagtgtcatggactgaaccgacaggcacagacgtttccttaaactttatgccgaatgaaaaacggatgcacggaattattttcttcccgaaatgggtgcatgagcatccggaaatcacggtgtgctaccaaaatgattacattgacgtgatgaaagagtcacgtgagaaatatgaaacgtacccgaaatatgtcgttcccgagtttgcggatattacgtatcttaacaatgcgggaatcaataacgaaacattgatttcagaagcgccatacgaaggaatgaccgatgatatccgtgcgggaaaattaaaataagagaaaaaacccggcagcttggccgggttttttgtatccttttacgagagggttttggtcatgataaagtcgacttgtttatcatcccccatataaaaagagtgttctccggtttggacaaaccccattttttgataaaaggcgattgcattttcgtttttttcccatacgcccagccagatgttctttttattgtgtgctgttgcgattttcacagcttcattcagcagatatttgccaagcccgtgtttctgatggctttttcttatataaattctctcaatctcaagagaatcttcccccattttttctgactgtgcttcgttcatgttgacttttacataccccgcaaggtcatgatgataataaacaaaatagaattgagaagacggattggataattcctttttcagctgttcagagcggaatgcattttccaaataagctttcatattttcaggtgaattttgatctttaaatgtatcattgaatgtttcaatgcttatctcccggagctctgttatatcgttaaggctgcacttttttaatttaatactcagggtcatacagctcctttcttcatttatcataccagctgaattttgttgtatttgcaatgaaaataccgtatagtaaacataccgtaattttgttgtatttgcaacataaaataagaaaatgaggacgataaagtgaaatatgttttttatgttttaggaatcatgatcttgacctttggtatttctgtcacgattcaatcagatcttggaacatcgccttttgatgcgcttattgtgggattgtccgtccatgcagggcttaccgtgggaagctgggaaatcatcatcgctttcctgttaatttgctgtaattcaatgttaaaaaggcaaagaccggaattttcagggatgattacggcgttcataacgggaatcgggattgatatgtggcttttttttctgcatcgagtcataacgcctgaactatggtacggaaaggcgggctgttttgcaatcggtttagttgtgatagggataggaaccgcaacctatctgcacacaaatttcgcaccgatcccggttgatcggttaacgctaattgtccgtgatttaaccgggagaagcatctttttttcaagaacggtcatttacttcatatttttcatactggccttgatgctaaaaggtccggtaggcatcggaacgttattaaccgtttgtttaggcgggatcttccttcatttctttatgccgattaccggaagatggatagacggcatattaacagcatctccaaagcaggaaaaaacgaaaacccggtaacggcggtttttacccgattctatcatttttcatttcacccgcatgtttaaggtataataaaaaagggggagggatttttatgagcggtcaaagaaagctcgttttttacggagctgtcagcgcagatggctatcttgcgcgggaaaatcattctttagattggttaatcggaactgaaggtgaagacagcaccgattatgaagctttctatgaatctgtcgatacgatcattatgggcagaaaaacatacgaggaaatattggttttattgcctgaggaatttccgtacaaaggtaaagaatgctatgtgttttcgcggacattgaccgggcgtactgaacatgtgcggtttattcatgaagagcctgccgattttataaatgcattgaaacgccaagaaggcaagcggatttggattgtcggcgggagtgatctgctgcacccggttttggaggaaaaacttgtcgatgagtttatcattcagatcgcccccgttctgctcggccgcggaatttctttgtttaaacccggagaccgggagacaggactgaagctgactgatgtcaggcgttacaaacaatttgcggagttgcattatgaagtgagataaaatgaaatgtatgaacgaaacccagtaaaggttaccgggtttctttttcatgtttgtttttatgttttgaaatggtgtgggccggaccgcatgaaaatcctgcaaccatgataacaacccctatccacctcacggcatagaaatcagtgtcgcgcaggaagataaatgaaactaagataataagcgccccgattataacggcagctgtgccgataatacttgatttctccatatagaaactcctttatgaatgtttggttaacgtattgggttggaatataacatatcaggggtaatgcggaaatggatatgctgcgaagctgactgatgtctgtaagatgaaaatgaaacgccaagggagccggctcccttggcgttttttatgcttgaaacaggatgcggcgttttgctgaatcgggatcactttcgacagcggtatccgtgttgaaaagcaaagtttcgcgtgaatcggtttcatattcaggccaattgaagtgagaggtgttcgggtttccggtttttgcaaaagcgagccatgcggattgaatttgtttggaaagctgttctgcgtcatcaccgagcggctcttgcagcgtctttctcaaagaatcaaagtttccgaacacaaacggcaattccagagcgtgaacggctttatgaaacggcggtgtttcgccatgccaatcaaagcggtacatccagaccggtgcgtgttgcgactgtccttgtgcgaaagcgacagccggccgccagaaaatcagatccgtcatcatatcgatttgtccctttaatgaatgcggatataaatctgccgcttgctcggtgcagttttctccgaggtgataatgcaaataatcttgctgctttttctcggagtgaatgtctgtatcaggggtgaaaaacaaatatgcttcatcacgattggttccgatgatcataggtatgccttctgcggccccgtctgctatggctttcaccggttccgcaggcaatgtggccggatcgatggcgggctgaaacaaaagctgaaaaatgttttgatccagtgagcgccgcactttatccgcagtcttaagcaggtcattaacggaaagctcctgcaattgatcagtgccggcttcatgaataaatgccgccgcgatgtcttttgccatatccgccggcatcgtatgagaggcgccgctttctaaaatggctttatgaaacaggccttttgcgtcaggcattgccataagcgcagcgatgctcatgccgcctgccgattcaccaaatatcgtgacgttatccgggtctcctccaaattcggagatattgtccctcacccagcgcagcgcggcgatctgatcgagcagcccgatattggcggaatacgcgtcatgaatagaagacaaatgtaaaaagcctaacggtccgagcctgtaattgagtgtcacgacaatgacatctccgtcagcggcaagggcagatccgtcgtaaagcggttcgcttccggcacctaaataaaatgccccgccgtgtatccataccatgacaggctttttttcgccctctgaatcgggggcgaaaacgttgaggtaaaggcaatcttcagattgaggcggtatatctccggaaaacgatatggacagcatatcatccggctgcggacaaatcggcccgaacgaatcggcatgttttatgccgtcccaaggtgcgggcggctccggcgctttaaatctcagctctccgacgggcggcttcgcgtacggtatgcccttccatgtgcgggcaccgcggccggcagttcctttcagtgcgccgcagcgggtttgaacggtaagttttgtcatgatttcatccccttttttcttttcattataaacagagatgaaggcatgaagcgaataaaagccctttcatcagcatatcatcagtaacgcttccgttctaaaaatgatctgacttcctgaacggacaagccgagttcttttgcttcctgcatcagcgctttccattcttcaatgttggattcagtcagttttctgttacggtaggatgcgggctccgggcgcttttcagtcagtttgttcgtaaaggtgaacagttcttctttcggcatgcccgactgcacggcctgcacaaggtggatgcgccactcatcttccgtgcctcccatgtgatgcagcatcgtttcggcatcaaaaagctccgtcagatcgacctgcagggtggcggatacttttttcagaaattggatggacggatttgagtgaacccccgttctatcttgcttaaataagatttagagacacctgcttcaactgctagctgattaatagagtagccttttcttctgcggtataaacgaattattcttccaatcattgtgctgaattctcccctgtatactggcatttttttgttcattataagaaatttttcgttctttataaaatttaaaattataagggaagtgcagtaaataagaggaaaatcatgataatgttctctaaaaagaactaaatggcttaatttgaaattttcaaatttcgaccttttcttttataatccaatcattaacagaagggggcgtttaagcctgatgcaataaggatgaggctgtaattacatgaatgagaatatgagttttaaagagttatttgacattattaaacacagatttttactgatttttatcatgacagcagttgtaacgctgatgacgggatacatccaattccgggtgatttcgcccgtttatcaggcatcgacccaagtgctcattcatgaaacaagcggtgaaaaaaattcgaatctcagcgacgttcagctgaatcttcattacaacaatacgtttcaaacgataatgaaaagcccggttgtgcttgagaaagtgaaacagaagctgcatctttctgagacggcatccgctttaaaagcaaagatcacgacaagcagcgaaaccgattcagagatcattaacgcagcggtgcaggacgagaacccgaaacaggccgccgctatagcgaacacgctgatgaagacatttaaaaaagaagtccgtgacaggatgaatataaaaggcgtcattgttttgtccgaggcaaaagcatcggaaagcccgatggtcaagccttcgcgcatcaggaatatcatgatggcgttcggtgcggctctcatggcgggtgtgacgcttgcgttttttctccactttcttgatgaaaccgttaaaagcgagcggcagctcagcgaaaaaacagacttgcctgttttaggggttgtgtatgacatcaaaaatcagcagacacggtctgatgaaaaacatttcggggagtgaggcgtttgggattcagaaaaaagaaatcaagaaggggactggctcaaatatccgttttacatcacaaatcattggtggctgaacaatatcgcaccattcggacaaatattgagttctcctctgttcagacccatttgcgctctattctcgtcacttcctccgttccgggagaaggaaagtcattcagcgccgccaaccttgccgcggtatttgcgcagcaggaaaaaaaggtgctgcttgtcgatgccgatttacgaaaaccgacgatacacgagacctatcagcttgaaaatgtacaaggccttacgaatgtgttagtcggaaacgcttccctcggcgaaacggtgcaaaaaacgctgattgataacctttacgtcttaacgagcgggccgacgccgccgaatccggccgagcttttatcttcaaaggcgatgggagagctgattcaggagatgtacagccggtacagtctggttattttcgattcacctccgcttttggcggtggcggacggccagattttagcgaaccagacagatggaagcgttctcgtcgtcttgagcggaaaaacgaaaatggataccgtccaaaaggcgaaagacgcgctccagcagtcaaaggcaaagcttttgggggcgctgctgaataaaaagaaaatcaaaaaaacagagcactactcgtattgagcggtgcaggtgatgtctccttacctttatcaacggaggcactcggctctgctgtgggcggcgttttccgccgccttagatgctggtcgtcggtggcggggtgtgaggacgggttaaatgcccaatttatcttaagatgatgcattgttatcggcttagctgttatgtctgtttttacgaaaaccgtatcagctaaaccgataaatgaggaggggaaagattgacttaccggagaagactttcaatgatttttgcattggatacgtatctcgttttactttccgttgttataggatatcaattttttgaggattcttatcacttttatgactccggagcgttgctgctgaccgccgtgaccatgctgatcagccatcatgtatgcgcttttatgtttcaccagtataagcaggtatggacgtatacgggaattggcgagctgcttgatctgctgaaggggatcacgctgtccgcagctgtcacagccgccgtccaatacggggtgttccacacgattttgttccggctgttagccgtcagctggatggttcagctattgttcatcggaggaagccggatgatttcgcgcgtgctgaaagaaacgatcggcaggaagcaaaatgactcttcccgggcgctgatcatcggcgcaggcgcgggaggaacgctgctcgtccgtcagcttacgcagaaaaatgatctcggaatcatgcctgtggcttttattgatgatgatcagacgaagcataagctcaaaatcatgggcctgcccgtcatcggcggaaaagaaagcattatgccggcggtgcaaaggctgagaattcaccacatcatcatcgccattccgtctctttgcacccatgagctccagacgctgtacaaagaatgtgtgcagacgggcgcccatattaaaatcatgccgcaatttgatgagatcctgctcggaacgcaggctgccggacacatcagggatgtgaaagccgaagatctcctcggcagaaagccggtcacccttgatacgagcaaaatttctgacagcatcaaagggaaaacgattctggtcacgggcgccggcggctctatcggttctgaaatctgccgccagatcagctcgtttcttccgcatgaaatcgtccttctcggccacggggagaacagcatttattcggtgcataacgaactgtccgcacgcttcggcaaagaggtgctttttcacgcggagatcgccgatattcaggacagagataaaatctttacgttgatgaaaaaatacgagccgcacgtcgtctatcatgcggccgcccataaacatgtgccgttaatggaacataatccggaagaagccgtcaaaaacaatattatcggcacgaaaaatgtcgccgaagccgccgatatgtgcggaacggaaacattcgtgctgatttcttctgacaaagcggtcaatccggccaatgtcatgggcgcgacgaagcggtttgcggaaatggtcatcatgaacctcggaaaggtcagcaacaccaaattcgccgccgtccgtttcgggaatgtgctcggaagccgcggcagcgtcattccgattttcaaaaagcagattgaaaaaggcggacccgtcaccgtcacgcatccggcgatgacaagatattttatgacgatccccgaagcgtcaagactcgtcattcaggcgggggcgcttgcaaaagggcggcagattttcgttctggatatgggagaacccgtcaaaatcgtcgacttggcaaaaaacctgattcatttatcaggctatacgacagaacagattcctattgaattctccggcatccgcccgggagaaaagatgtatgaagaactgctgaatcataatgaagtacatacggaacagatttttccgaaaatccatatcgggaaagcgatcgacggggattgggccgtgctcatccgttttatggaggaattcagccgtctgcctgaagatgagctgagaaaacggctgtttgaggcgatcgaatcagtacatgaagaagcggccgcaggtgtgtgatgggaggacagaaagatgacgaaaaaagtattattctgcgccactgtcgattatcattttaaagcctttcatcttccgtattttcaatggtttcaggatatgggctgggaggtgcacgtcgcggcaggcggcaatatgaatcttccattcgttgatgaaaagttttccattccgatccggcgctcgccgtttcatcccgaaaatctttctgtttacaggcggctgaaacggctcattcaggctaacggctacgacatgattcactgtcatacgccggtcggcggcgtgcttgcacgccttgcggcgagacaagcgcgccaaaaagggacaaaggtgctgtacaccgcgcacggctttcacttctgcgatggagcgcccctgaaaaattggcttctttattacccgatcgaaaaatttctctcttcttacacggattgtttgattacgattaatgaagaggattacgaacgggccaagcaaatgaaaaaaacagcttgcggcgcgaagaaaatacacggcatcggcgtgaatacagacaggtttcgccctgtgagccgggcagagagtgaacgtctgagagaaaaacacggcttcggcgccggggaatttatcctcatataccccgctgaattaaacggcaataaaaaccagggacttctcattgaggctgcggcactgctgaagaaccgcattccggagctgaaactcgtatttgccggagaaggcgcgatggaagagccgtacagaaaaaaggctgaatcactcggggtatccgacattgtgcggttttacggtttttgccgtgacattcatgagctgattcagcttgccgatctgtccgtcgcctcaagcatccgcgaagggctcggcatgaatctgcttgaggggatggctgccgaaaagcccgccgttgccgcagacaacagggggcaccgtgagatcatcgaagacggtgtgaacggttttctcgtgccggcaggggacagcgcggcatttgccgatcggattgaaaagctgtaccgatccccgggtctgcgaaaagcaatgggacaagaagggcgcaggacggcggaatttttttcagaaacacgtacggtaaaggaaatggcgcacatttacgccggttatatggataaaaaggagaaaagcgtatgaatgcaggagcacaaccgaaaatttccgttatcatgggaatttataattgcgaagagactttagcggagagtattgaatccatcctgagccaatcgtataagaattgggaactgattatgtgtgatgacgcgtcaactgacggaacgtatcagattgcgcgccgttacgcggatcattacagcgaccggatcacgctgattcaaaataagacgaatcaacggcttgccgcttcgctgaaccgctgtctgacatacgcaacgggggattatatcgccaggcaggacggtgatgacatctccaacccgaggagactggaaaaacaggccgctttcttaaacaagcacgcccactatcaagtcgtgggcacggggatgctcgtatttgatgaattcggcgtcaggggcgcccggcttttgccgcccgtgccgaaaccgggaattatggcgaaaggcacaccgttctgccacggcaccattatgatgcgggctgaagcgtacaaagcgcttggaggctaccggtcagtcaggcggacgcggcggatggaggatatcgatttgtggctgcgcttttttgaagcgggtttccgagggtacaatctccaggaaacgctgtataaagtaagagaggacagtgatgcgttcaaaaggagatcgtttacgtattccattgataatgcggtgctcgtttttcaggcatgcagacggctgaagctgccgatttcccattacgcgtatatcgcaaaaccgctcatccgcgccattacgccgcccgcggtcatgaaccgttatcataaaaacagggacatccgccaaaaagaagggcttgccgaacatgactgacaaaccgatgcgggtgctgcacatcttcagcgggatgaacaggggcggcgcagaaacgatgatgatgaatttgtaccggaagatggacagaacgaaggtgcagtttgattttttaacccataggaacgatccgtgcgcttatgacgaggaaattctcgctctcggcggacggcttttttatgtgccgagcatcggcagcacaaacccgattacatttgttaaacaggtcaagcgggtgattcaggaaaaaggcccgtttgccgccgtgcacgcccataccgattttcagtcgggatttatcgcgcttgccgctcgtttagccggcgtcccggtgcggatctgccattcgcacagtacgtcgtggcgggggcgggcgtcgcggcttgccgggatgcagctgtttgttttcagacggctgatcacggcaaacgccacggcactgtgcgcctgcggaaaagaggcgggccgtttcttattcgggaaagaaaaagacgtgcatcttttgccgaacggcattgatctcgacttatttgccggcgggtgcgcggacacagaagctgaaaaaaggaagcggggcattgcagacggccgtttggtgatcggccatatcggccgctttacagaagaaaaaaaccacgaatttctgctccggctggccgctgatatgaaagagcggggcatcggcttacagctgattctcgccggagacggtccgcttcgcaccgatatggaaaatctggcggcgaagctggggcttgatgatgatgtgcgttttatcggcatagaagaccgcgttcatgatctgctgaaaacgctggatgtatttgtcatgccgtctctttatgaagggctgcccgtcacgctcgttgaagcgcaggcctccggggtgccgtgcgtgatatcagacggcataacggaagaagccgatgccgggctcgggctggtcaaaaggctcagcctcaaagaaccgccgggacaatgggcatccgcggttttacgggcagcagaggcggcaaagcctgacggggcgcgtattaaagaaaccctcaggcggctgggatatgacgcgggagaaaatgcgggggctgttatgaagctttacaatatgaattggaaaaaggaacagtaacgaatgattgtatatgtagtcaatatgggaattgtttatatttggtcatggttcgcgaaaatgtgcggcgggcgtgatcaatcgctttcgaccggataccggccgaatcagctcgtcatgctcgttccgctgctatcgctggtattggtctccggtttgcgctacagagtcgggacggattttcagacgtacgcgctaatgtacaagctggcgggaaattacggcagcatttgggagatcttcgggttcggagcgaaaaaagcagccgttgatccggggtttacggctctcatctggctcatgaattttatcacgaaagatccgcaaatcatgtatttcaccgtggcggtcgtgacatgcagctttattttaaaggggctcgttgagttcggccgtccgtttgagctgagtgtatttttgtttttgggcacgtatcactattacgcttcctttaacgggatcaggcagtatatggtggcggccgttttgttttgggccgtccgctacgtgatcagcggaagctggaagcgttatatgtcaatcgtgctgctgtgttcgctttttcattcctcagcgctgattatgattccggtttattttctcgtcagaaaaagagcctggtcgcccgcgattttcggactgtcggcattgtttcttcttatgacgtttctgtatcagaagttcatttcgctgtttgtcgtcgtgctggaaaacagctcgtacggccattatgagaaatggctgatgacgaatacgaacgggatgaacgtcgtgaaaatcgcggtgctgctgctgccgctgtttttggctttctgctaccgggagcggctgcggaagctctggcctgacattgatgtcatcgtgaatttctgtctgctcggcctgctcttcggtcttttggcgacaaaggatgttatttttgcccggtttaatatatatttcggcctgtaccaaatgatcctgatcccttattttgtgaggatttttgatgaaaaatcaaatgcgctgatttatatcgccattattgtctgttattttctttacagttacttgcttatgccggtcgattcgtctgtgcttccgtacagaacgattttttcccggtaatggacactggaggtttatatggaaacacccgcggtcagtttattaattgctgtgtataatacggaaacttatttagaaagatgcttagattcattgctcaatcagtcgctcgccaatatcgaaatcgtggccgttaatgacgggtcaacggatcaaagcccggcgattcttgaaacctatcagaagcgggatgagagaatcagggtcgttcatcagcaaaaccgggggctcggcgcggtccgcaacaagggcatcgaggcggcgcgcggcgaatttatcgcttttattgatgcggacgactgggttgaacctgattattgcctgcgcatgtatgaaaaagcgaaggctgatcaggctgatctcgtgatttgcgaatatgcggctgaatttgcggatacggggaagaccgccgtttcaacgatcgcttcagcgtacgagggccgcccgaaacaacggtacctgaaagatttatttgaaggaagagtcagcggcttttcatggaacaagctgtacaaaagatccatgatcgagcatcatcagctgcgctttccgcttcgtgatgagctggagcacgtggaggatcagtatttcagcctcagggcgcatgttttcgcaggtgcggtctcgtacgtggatcagccgctctatcattatcggattcacttgacttccattgtgcaaagctatcagaaaaagctgtttgactcaggtctcgttctctatcggctgaacgaggcttttttgcgtgaaaacggctgcttacacgaataccggcaggagctggattttttcatcgttcagcacggaacagtctgcctgctgaatgaatggaagcggaataacggcggccggttttctgagaagtggaagaatatcagccggatatgcgctgatcccgtattccgcatgagcctttccaaaacgggaacggcgccgtttgacgccaaacgctcatgccttctgcttttggcgaagctgaagctgattccgttcgtgtcgctggcatcagccgcgtatcagcgggcaatcgagtacaaaatgaaaatcagagggtgaagacatgtcgatacaatctttaaaaatcaatctcgcggaatggcttttgcttaaggtcaaatacccgtcccaatttcatttcggaacgggagcggatggggcggcggggcttacagcggcaagaaaaaagatcattctgacgctgctcccgtcccacgataatctcggcgatcacgccatcgcctacgcaagcaaaacgtttcttgaacgggagtatcccgattttgacattgtcgaggtggatatgaaggatatatacagatcggcaaaagtgctgatcaaaaagcgccaccccgatgatatggtattcatcatcggcggcgggaacatgggggatttgtaccggtatgaggaatggacgcgccgctttatcataaaaacattccggcaatatcggatcgttcagcttccggcgacggctcacttttctgaatcaaaaaagggacggaaggaactgaagcgcgcccgaaaagtgtacaatgcgcatcccgaccttttgttgatggcgagagatgagacgacgtatcaatggatgaagcgtcattttcccggaaaaacagtgctcaaacagcctgacatggtcttatatttggataaaagcgagcggggcatagcgcgggaagggatctacctctgtttacgggaggataaggagagcgcgctgacggctgaggacagaacgatggtaaaagaagctttggccaaagagtacggagagctgtattcctttaccacgacggtcggccggagggtcagccgccatacacgcgaaaaggagctggaagcgctttggaatacgctgaaaggcgcggaagccgtcgtcactgacaggcttcacgggatgattttttgtgcgctgacgaaaacgccttgtgtcgtcattcgttcgtttgatcataaggtgatggaaggctatcaatggctgaaaaacataccgaacatgacattgcttgaacgtcccgaccctgaagccgtaacatccgccgtaaatcggctgctcagcggcaagcatgaggaaggcggttctttgcgaagtgtttattttgccgggctgcgctcgaaaatcagcggtgatgcccaatgaccgcgccgcttgtgagcgtgatcgtgccgatgtataagacagagccttttattaaagaatgcgcggtttctttaacaaaacagacgctgaggaacatcgaaatcattttcgtcaatgacggttcaccggatcagtcaggccggatggctgaacaattcgccgcagaagatgcgagaatccgggtgattcataaagaaaacggcggcctcagctcggcccgcaatgccggaataaaagccgcccgcggccgttatatcggttttgcggacggcgatgattatgtgacggaaacaatgttcgagcggctttatgaagaagcggagaagaaccggctggatatcgccggctgcggttattacaaagaaacgccgtctaaagaaagaacgtatatgccgccgtcccttccgccgggccgcgtcttcacagcggatgaaatgaccgcattgctgacccgcgcgcacgaacatcggtttatttggtatgtgtggcgctatatataccggcgagaagcattgcaagggctgttgttccatgaagatatccggtttgccgaggactctccgtttaacttggcagcgttccgccaagccgcgcgtgtcaaagtgatagacgaagggctgtatatctaccgggaaaatccgcaaagtcttacagaaacaccgtttaagccccgcttagatcacgaactgcaaaagcaatatgcagcgaaaatggctttttatgaggcaaacgggctgacggacgcctgccggagcgatattgatacatatttgtgcaagcatcagattccgatgctgatcgccaacgcatgcgccgccccgcagccgtcacaccagattacggcgcatatcggcagaatcttaacgtatgacatggtaaaaacggccgtgcgcaggacgccgtgccgccataaacagctgctggccggggagcgcgtggtgctcggtctgtgcaaaatgcgccttcctcttcttctgcatgcgtttttcgaacggaaatcgaaagagaaaggcagtgcggaaggagcatgaaatttgccattaatttcggcgccaatgtgacggcgtttttactatcggtgtttttatcagtgtggatgacgccctttattgtgaaaacattaggtgttgaggcttttgggtttgtccatctgacacagaatatcattaactatttctctattattaccgttgcgctgagctcagtcgttgtgaggtttttctccgtcgccgcccacaggggaacagggacgaggccaatgcgtatgtaagcaattatttagccgcgtctgtcgtgatatctctattactcgctgtgccgctcgccgggactgctttttttattgacaggattatgaatgtaccggccgggctcttaacggatgtgaggctgtctatcgtaatcggcagcgtgctgtttatgctgacgttttttatggcggggttcgcgacggggccgttttttgccaacaagctttatatcacaagttccattcaggccgtgcaaatgctggtcagggtgctgtgtgtgctcgctctgtttacgtgcctgccgccgaagatctggcagatccagctttcggcattagcgggagccgtctgtgcagctgtgctgacttttttcttctttaagaaattgattccgtggttttctttcagccgtaaaactttatcattacagacaagcaaagtgctgttttcggccggtgcctggagttctgtcaaccagatcggcgtgctgctgtttctgcagattgacctcatgacggccaaccttgtgctggggccgtctgaagcgggtgtctatgcggcgattattcaattcccgcttctgctcagaagtcttgccgggacgcttgcttcactgtttgcgccggttttgacttcctattattcaaaaggcgatatggaaggtctcctgtcttacgccaataaggccgtgcggatgaacgggcttctcctcgcgcttcccgccgcgttattaggagggcttgccgaaccgtttctggcgatttggctgggcccgtcgtttgtgcagacggcgccgcttttatatattcacgccgcgtatttggtggtcagtctctctgtcatgccgcttttttacgtatggacggcttttaataaacaaaaaacgcccgccgtcgttactttatgtttaggcggactgaatgtcatattggccgtggttctcagcggaccggcacatctcgggctgtacggcatcaccattgccggggctgtctccctcattttgaaaaatgccgtcttcacgccgctgtatgtttcgcatattaccggctttcagaaaaccgcgttttacaaaggcatgttcggcccgttggcggcggccgtatttgcctgggccgtctgccggggtatccggctgttttcaccgcttgacggctgggccggtctgatcgccgcggggcttgccgtatgcataagctatgccgcattcgcttttttcttcatttgtacgaaagaagaaaggcggcttgctttacagaaatgccgaaaagtgaaaggagctgttcagatttgaaggtgaaacgtgtatttgatatagcggccgcgacgctgttattgtgcggcgcgagtgtcattcttctcttcgccatggcagccgtcagatgcgccatcgggtctccggtattgttcaaacagacgagaccggggcataacgggcgtccgtttacgttgtataaactcagaacgatgacggatgcgcgtgatgaaaacggtgtgctgcttccggatcatctgcgcctgaccaaaacgggaaggctgatcagaaaactgagcatcgacgagcttccccagctttttaatgtgctcaaaggcgatatcagtctggtcggcccccgccctttgctgatggattatctgccgctttacacggcggagcaggcgcggcggcacgaggtgaagccggggattacgggctgggcgcaggtcaatgggagaaacgcgatttcatgggaggagaaattcaagctcgacgtgtggtacgtcgacaaccgcacctttcttctcgacttaaagattctgcttttaacagtgaaaaaagttctcgtgtcagaaggcatacaccaagccggccatgtgacggcaaagcgcttcacaggcagcggagatatgtcatcgtgaaaaaggtcgtgctgatcggaaacggcggacacggaaaagtcgtgaaggaaatcgtgcaggcccgttccgatatggagcttgcgggcatattggacgacggattcagcggttttaccgctcggaacggtttatatacgggccggacggaagacgtgcacatgcttcggaaactcgtccccgaggccgtgttcacgatatgcatcggccgcaacggcgtcagaaagcagttcgctgaaacgcttgggattgaagctgccgattatgcttcactcattcaccccggggcgatcgtcagtgaaacggcttccgtcggacacggaacggttgtgatggcgggcgccgtcattcaggcgggcgctgacatcggcgcccattgcatcatcaatacgggggcggttgccgatcacgacaatgcaatcggagattacgtccatctttcaccgcgcgcggcgcttgccggcggagtgaaagtcggggaaggaacgcacatcggaatcggcgcgtccgtcataccgcagatggacatcggcccttggtccgttatcggcgcgggggctgcggtcatcagcagaattcccggccatgtgacggcggtcggcgttccggcccgcgtcatctcccctatccataatgaaaaaggatgatttcatgcaaacaaacaaacggatttatttgtctccgcctcatatgagcggaaaagaacaggaatacatcgcagaagccttccgaaccaattggattgccccgctcggtccgctcgtcaattcgtttgaagcgcggctcgcggaatatgcgggagtgaaaagcgcggcggccttaagctcgggaacggccgccatccatcttgccctgcggcttgcgggtgtgaaaaaaggagacgttgtattttgtccttcctttacgtttgtcgccacggcgaatccgattgtgtatgagcaggctgagcccgtttttattgattcggaatgggagacgtggaatatgtcgcccgctgcgcttgagcgggcgctccgggatgcaaagcggcgcggcagactcccgaaagcggtgatcgccgtcaatctttacggccaaagcgcgaaaatggatgaattaatgagcctttgtgacgcatacggcgtctgtctgattgaagacgctgccgagtccttaggatcaacatataaaggcaggcagagcggcacgttcggccgtttcggcatttattcctttaacggcaacaaaatcattacaacatcgggaggcggcatgctcgtgtctgacgatgaagccgcgattgaaaaagcgaggtttcttgcgtcacaggcgagagatgccgccgttcattaccagcacagcgagctcggttacaactacaggctcagcaacattctcgcgggcgtggggatatcgcagctggaagtgcttgaagatcgcgtccgggcgaggagagaaatctttcaccggtatcgggaagcgctcgaaacatatccgggcatccgcatgatgccggagcttgaaggaacggtttcaaaccgctggctgacggctctgacgcttgataacggcgtgacgccggaagaagccgtcgcctgtcttgcggaacagaatattgaggcccggccgctgtggaaaccgctgcacacgcagccgcttttctcatcttccgtcttttatcctcacagcgaccatgagcgtgtctctgagaaccttttcagccgagggatttgtctgccgtccgggtctgacctgtcttctgaggagcagcagcgtgtcattgacgcacttgcgcaactgtttgaaacgaaaggggagaaaacatggacagccgccatgttatgagccgattaaaagagacgctgacgggtctgctcagcgttataccgccgcaatccgacatcatatatgccgactatcccctctacggaaatgtaggggatttattgattatgaaagggacggaggcgttttttaaagcgcacggcatccgcgtgaaacagcgctggaatcccgacaattttccattcgggcgccgggcggacaaaaagacgatcatcgtctgtcagggtggcggaaatttcggggatctctatccgtactatcagacgttcagggaaaaaatcgtcaaatcctttccggaaaacaggatcgtcatcctgccgcaatcgatttattatcaggatgagacacggctgcaaaagacatcggcgctttttgcggagcacaaggatctccacctgtttacgagagatcatgtgtcatacgagactgcgaaacgctttttttcggcgaatcatatcgggcttatgcctgatatggcccatcagctgtatccgatcgcggcgtcagcggttccgtcacgcggcaggctttattttatccgcacggatggggaaatcaacccgaagctgcaaaacaattcttccgttaaaagctgtgactggcaggatgttctgtcagcaagcgaccgcaggggaatcgcttttttccaaacgctgaatgttttgaataaaaaagcgggaaacccgctgccgattgcgcggttttggaaccgctattccgatttcttaacgaaaaaagcggtcctgtttttcagcaggtacgaatcggtggaaacgtcaaggctccacggccacatcctgtcctcgcttctcgggaaaccgaataccgtcattgataattcatacgggaaaaacgcgaactattattacacctggacgcacgaagcgccggacgtccggctgatcggtgaaaccgccggcacgaaggaaaaccttccgctttgaatgagcggaaggtttattttgtttctccgcgttttactttgttgtacgcctcatccaaatgctgaattcttttgagcacaaccgagtttttcgtcagctgatcctgtacaagggttgagacgacggagcggtaatagctgttcatcgcatgaattcggtcttcattcggattcatttcaatgtgctgtgtaaagttttcaataaaatagggaacagaaaaaagttctgacatctataaagcaactccttttaataagtatatacggtatgaaaccaatcatgtacaatgaaaaaaggggagtgagcatgatggatatcaaacttcagcaaacacaaatgttaaagcctcaattaacgcaagagcttaaacaggccatcacattactcggatacaattccgcggaactggccggatatattgatgagctctcactggaaaaccctctgattgaacgaaaggaaacagacacgccgccactatcttaccataaaacaaataaaaacaggatgaaagaacgggacggaagccagcagatcagacttacccgcaaaacgctgcaggattcgctcaaacagcaagccttagacatgaagctgtccgatgatgagaaaaaaattttcaattatctgatacattcattggattcaaacggttatttaaaagaggacataccagccgccgccgaccatgtatccgcttcacaagaggagacggaagcggttctgaaaaagcttcaatcccttgagcccgcgggaatcggcgcccggtctttgcaggaatgcatccttcttcagctccgccgtctgcccgagcggaacgaacaggcggaatggattgccgaagcctattttgagctatttgcaagaaagaattggaaagcgcttacacttaaaacgggcattccgcttaaagacattcaggacatcgctgacatgatcagcgcgcttgatccgaggccggggctccgttatgcgcatgaggagccgggtttttacgtagaaccggatattttcatcacggtgaaaaacggcatcattcaagcgcggctcaacagccgttcgtttcctgacatccagcttcatgcccattatcagccgctcttgtcagccgccgggtgccgtgacacgaaaaattatctgtcggcaaaatatcaggaatggcgctggctgaaccgggctttgtcgcaaagaaaacaaacgatcacgagaattatcggcgtcctgactgaacggcaggaatccttttttctcacaggaaaaagcggaatgcagccgctgaccttaagagaggtggcggaaacgctggagctccacgaatcaacgatcagccgggccatcaaagggaagtacgttcagacgccgtacggactgtatgaaatgaaaacatttttctcggcgaaagctgaatcatcgggggacggcggcgcctccaattatgccgtaaaagcgcatctggaagcattggtccgtaaagaagataaaaagaaacctttttcagaccaaaagcttgccgatctgctgcatgaacaatatgacatccgaatctcaaggcgcaccgtcgccaaataccgtgaccaattaaatattccgccgtcatcggcgagaaaacggtacagctgaaacctccccgagccaaaccccggggaggttctccgtgttacgggatcatccatgaaaacagatgatgctgtaaaaatgtaatgagacagacgagcagaagcaaaaacagactgtgcttaatcgtaaagcggaaaaggtcggcttccttgcccgccagaccgacagcggcacaggcaaccgcaatggattgcggagaaatcatttttccggtgacaccgcctgatgaattggcggcaacggagagaaccgggtccatcccgacagatagcgccgtcaccttttgcaatccgccgaacaataggttggccgatgtatcagagccggtaataaatacgccgagccagccgagcaccggcgaaaaaaaggtaaacatcgcgcccgtcatggcaagcgcaagaccgagtgtcgtgctcatgccggaagcattcgtcacatatgcaaagccgacaacagaaacaatggtcacgaccggaagcgttaactctttcaccgtttctataaacgcttcgccccacgtcttccacgacatgccgagggcgaacttggagatgacggcggcaatcagaatcgccgttcccgctgaaccgaaaagctcaagtttgtacacggcttcaatcggcgtgccgtccgcctgaagaatctgctgatttacaaatgggacgggaggcgtgaaggtcaatgctttcccggctgcattcagccaggaaagccacattgacgttccttcataatgaccggttaaagcagccttcacgccgggaatcccccaaacggatatcatggccgtcagaagaaggaaaggagaccacgctttaaacaccgcggcgcccccgtacttgatcggcgcccggtcagcggccgctgctgattcccgttctgccgcgaaacgaaaggccgttttcggtttccaaaatttcaaaaatacagcgagcgcggccatggaaacaagcgccgacagcacatccggaagctcaggccctaaaaaattcgagcttgcgtactgcacggccgcaaaggagacgccggaaacaagaatggccggccatacttcaaaagcctttttaaacccgctcatcaaaatgattaagtaaagcggaataaagacggataaaaaaggaagctgccggccgaccatttgggaaatttccattgccggtatcccggtcggaccttcgacggcggtaatcggaatgccgatcgcaccgaaggcaacgggcgccgtattggcaatcaggcaaattcccgccgcatacagcggctgaaaaccaagtccgacgagcaaagcggccgagatcgcgacgggagcgccgaaaccggcggcgccttctaaaaatgccccgaatgaaaaggcgatgagcagcgcctgcaaacgccggtcatctgtaattgagagcaccgaactccggataatctcaaactgtcccgttttcacggtgattttatacagaaagaccgatgtgacgataatccagccgatcggaagcagcccgtacaccgctccctgagaagcggacatcaccgctttttccgccggcatgccgtaaacaaatacagcgattaaaagtgaaacggctaacgttaaaagccccgctatgtaccccttcatccgtttcaccgcaagcgcccaaaaaaagaagataatcggcacgagcgcgcaagctgccgataaaagcaaatttccccctaaaggagcgtacccctgtgtccattgcatccctaaaaaacccctccttatgtcatgtaaacgattactttttatgataaggtcatctgatgaccgggttaattagcattatattttgaaagttttgaaagtacaatacttttcttgaacaaattgtctgaacctgtcggctacacaaaaaaagaagtataatagacgataaacatcaagattcacaagtgacggggtgatcgcgttgaaatataaacaaattaaaacgaaaaaaatctacgaggaagtcgctgacgcattgctggagaagataaaagcgggcgagcttaagccgggggaaaagcttgattctgttcaggcgctttccgagagttttcaggtcagccgctcggcggtcagagaagcgctgtcggctttgaaagcgatggggctcgtcgacatgaagcagggagaaggcacatacataagagaatttgagccgtctcatgtttcccagccgctttcttccgccctcttgatgaaaaaagaggacgtcaaacagctgctcgaagtcagaaagctgcttgaactcggcgtcgccgccatggccgctgaaaaacgcaccgaagacgatttacaaaaaatccgccaagctctcatggagatgaaagacattgacggagacgaagaattgggcgaaaaagcagatttctcctttcacatggcgctggcggaagcatcacaaaacgggctgcttaagcatctcatgaatcatgtctccgcgctccttttggaaacaatgagagaaacgagaaaaatttggctgttttctaaacgaacgagcgtgcagcgattgtatgaagagcatgaacgcatttacagcgccgtcgccgccggagacacggatgaagcggaagcagcgatgacggcgcacctgacgaatgtggaagaagtgctgggggcttattttgaagaaaatgtatagaagctgacttgtgaaaggggataacatcacatgcaggccgaatcttttttttctgaccatgtaaagaaagctctgacaaatgatcctcccggggaatggatgccggcagttccgaaagcgtgcatccctctgcattccggctatcccgatcccgcgctcgttcctgataaggagctgaaagaagccgcctcccgccttctggatgaggagcgtgatctgccgctgcattatataggaagcccgaggacggccgttttaaaaaagcagattcaagaacggttagccatccgcggcattcactgccgggacgatgagctgatcgtgacatcaggcgcctgtcaggcgatagatctggctgcgcgggttttcctcgatgaacaaaccgccgctgccgttgaagctccggtctatatggaagcgctcgagatttttaaaaattatacaccgcatatcatgagcattccgacagatcaagagggtctgcaaacagaaacattagcgtttatgcttgaggaaagaaaacgaaaagggcttgtgcttccccgtcttctctacacgatacccgcttttcagaatccggcgggaaccgtaatgtcatcgaagcggagaacccgcctgcttcagcttgccgaaacgtatgattttctcatcttggaggatgatgcatacggcgagctcggattcaccgatattccgccgcccttgaaagccatggatcaaaacggccgggtgctgtacgccggttcattatcaaaagtcatcgccccgggtatgaggatcggctggattgcaggggacgccgcattcatcacggcattgtcatggttaaaaaaagacttaggccatccgttttcccaagcggtgaccgccgtctatctggaacaaacgaatattgaagaacggctcgccgccttgcgggaagcatatcgaagcaaacgtgatgttttgctcgccgcatcagcgcgatatcttccggaatccgcatcctggcacgtgcctgaaggcggttactttgtatgggtgaaagcgccgggggctgatacgtccgcactgctggcgagggctctgtctcacggcgtttcctatgtacccggaaaatatttttttccgcatcaggaagacggtgccgaatatctccgcctgtcgttcagttttcccggtaaagccgcgataaaagagggtgtgcaaaaactgggacacctgctgaaaaacgggatctagagaagcatgggaagctttcaggcttctcttttttttacccttcagcgcatcgggcgaaaggatttttcagaaaaaccttccaatccatattcagaatagtgtaggatatttatagagctttccaaaaacaggtcatcagatgaccggatcacatactgaggatgaaagaggggttcatcatgaaagtctcattatttgtcacgtgccttgtggatatgtttcagaccaatgtcggaaaggcgacggttgaggtgctggaacggctcgggtgtgaggtggattttcccgaggggcagatttgctgcgggcagcccgcatacaacagcgggtatgtgacggatgcgaaaaaagcaatgaagcggatgattgccgcgtttgaagaagcggagtacgtcgtcagcccgtcaggttcctgtacgacgatgttccgtgaatatccgcatctgtttcaggacgatccgaagtgggccgcaaaagcgcagcagcttgcggacaaaacatatgagttaacggattttatcgtcaacgttctcggggtggaggatgtcggggcggtgctgcataaaaaagcgacagtccatacatcgtgccacatgacgaggctgctcggcgtgtcggaggagccgatgaagcttttgcgccatgtcaaggggctcgagctgaccgcgcttcccggaaaacaccaatgctgcggattcggaggaacattttctgtgaaaatggcgcaaatctctgaacaaatggtggatgaaaaggtcgcctgcgtggaagacacggaggccgaggtgctgatcggggcggattgcggatgtctgatgaatatcggcgggcgtcttgaccgtaaggataaaaacgtcagagtcatgcacatcgcagaagtgctgaacagcagataagacgagaaacaacaagggggtaaaatcatggcgatgaaaatcggtaccgccgcttttaaagagcgggtatcagaaggaatagataatgagtttatgagaggagccgtctccggagcgcaggaacggctcaggataaggaggcttcaggcggccgaggaattgggaaactgggaggattggcgttcacatgcggaagaaatcagacagcatgtgctggacaatcttgatttctatttggaacagctcgccgaaaacgtcgccaacagaggcgggcatgtctttttcgccgaaacggcggaagaagcgtcctcctatatccgcgatgtcatccggcagaaaaacgccaaaaaaatcgtaaaatccaaatccatggtgacagaagaaatcaatatgaacgaagtgcttgaggaagagggctgtgaagtcacagaaacggatctcggcgaatacattctccagattgacgatcacgatccgccgtcacatatcgttgctcccgctcttcacaaaaacaaagagcagatccgtgacgtgtttaaagagagactcgaatacaaacagacggaaaaaccggaagagctcgtcatgcacgcgcgcagcgttctccggaaaaaatttctcgaagcggatgtcggcatcacgggctgcaactttgcaatcgcggataccggatcggtcagtctcgtgacaaacgaaggaaacggccgccttgtgtccgcgctgccgaagacgcagatcaccgtgatgggaatggagcggatcgttccttcattttctgagtttgaagtgcttgtcagcatgctgacgagaagcgcggtcggccagcggcttacaagttacattacggcgctgacgggcccccggcagcaaggagaagctgacgggcctgaggaatttcatctcgtggttgtggataacgggcgttcccgcatactcggcacggaattccaatcggtgctgcaatgtatccgctgcgccgcctgcatcaacgtctgtcccgtgtaccggcatgtcggcggacactcgtacgggtccatctattcgggtccgatcggcgccgtcttatcgcctcttctcggcggatatgacgaatacaaggagctcccgtacgcatcttccttatgcgcggcctgtacggaagcgtgtccggttaaaattccgctgcacgagctgctgctcaagcatcggcagaacattgtggaaaaagagggcaaagcgccgatcagcgaaaaactggcgatgaaagccttcgggctcggctcgtcatccccgtccctttataaactgggatcgaaatgggcgcctgccgccatgacgccgtttacggaggatgacaaaatatcaaaagggccggggccgttaaaagaatggacggcaatacgggacttcccggcgccgcataaatcgagattcagagattggtttaaagaccgggaaaaacaaaagggggaagaatgatgatgaaagggacggttacacatcaggaatcctttctaaaccggatcgccggaagtctgggcagagagcgcaggaaatcaggcgtgtccctgcctgaatggaagtatcagcctcaatatcaaacgcatgcggactgtacggaagacgatcttgtcacgatgctgaaagaccactgcgtcaacattcataccgaactgatcgaaacggatgcagccgggctttacgacgctttgcgcacgcaggtgaaccgctttgaagggggcctgtcatcattccgaacgacagccggtttgaaatgtacggcttgcagacccttatgacagaagagtggccggacgaagggattcccgtttgggaatgggacgcggaacaaggagcgaaaaatattgaaaaagcggaacaagcgaatgtgggcatcacattcagcgagatcacgcttgcggaatcagccaccgtcgttttgtatgcgtcagagcatgccggccgttccgtcagcctgcttccgaccacctatatcgcaatcatcccgaaatcttccattgtgccgagaatgacacaggccagcgatatactgaaacagcagatcagagacggcgtcaccgttccttcctgcatcaactatattaccggaccgagcaactcggccgatatcgaaatggatttggttgtcggcgtccacggacccgttaaagccgcttatatcctcgtgaatgaccgataaaaaaacaaaccccggtttgcggccggggtttgtttttatataaacgcgttaatgatcatgataaaacagatcgcactgacagaaataatcgtttccatcgccgtccatgtcaggaacgtttcttttaccgtcattccgaaatactctttaatgagccagaaaccggagtcattgacatgtgacagaatcaaagagcccgctcccgttgccaaaacgagaagctcgctgctgacgcccggcatgacagatgcaatcggagcaacaatgccggccgccgtcatcatggcgacagtcgctgaacctgtggcgacacggatgaccgccgcgatcgtccagcttaaaagaacgggagagaagcttgagtgcttcgccatgtcagcgatatacgtgccgacgcctgaatcaatcaggacgttgttaaaagcgccgccggctccgatcacaagcagaatggaagcgatcggtcccagacagtcattgctgaattttaaaatgctttccctgtcaaagccctgataaaaaccaaggctgaaaaaggagtaaaccgtggcgatcaaaagcgccgtgacagggtcgccgataaatttaaaagtttcatagagcgtgcttttttccggaagcgcaatttcggcaagcgttgccataagcatcaggatcaccggtaccaatatcgtaaacaatgtatttgcgaatcccggaagcttgcgtttttcattccgttcaataaattgttttttcaacagttcgggaacgggtttatgaatgcgcttaccaatccattttccgtaaagcggccccgcgatgatggcagtcggaataccgacgattaaagaatacaaaatcgtttttccgacattggcgtgataaatgccgacagccgccatcgccgccgggtggggcggaaccaatccgtgcacgacggaaagtcccgcaaggagcggaatcccgatcgtcactaatgaaaccccggtttcaatcgcaatcgtaaacaaaagcggcacgagcaggacgaagccgacctggaaaaagaccgggatgccgacaataaaagcgacggccatcatcgcccaatgcactttctttttgccgaagcggccgatcagggtgtgggcgatccgctccgcaccgcctgattcagccatcatttttccgagcatcgtaccgagggccagcacgatcgcaagcagagacagcgtattgccgagcccggttttcattgaagtgataatgtccggcagattcatgcccgttgcgaaaccgacaaggatggatgtaatcaaaagactgataaacggatttaatttagcgaccgtaatcaataagagtaaaacgataatagcggcaatgacaataaacagtaacatgaccttttcaccctttctttcaaagaagaattaacggctttgtttgagctgaaattcactgatgacgtcaaattcatctttgagcttgtcatacagccgctcgtataagtaaaacagctcaatatatgtttcgctgtttttgacgttcggttcatggcggtgcgaaattctgatccagtcctgaacatcctcgatccgttccatttcgccaaggctgtgcaaagcgagaacggccgctccgagcgcagaggcttcgtaactttccggaacgaggacttcgcgtcccatcgtatcggacaaaatctgcctccacagcggcgatctcgcaaatcctcccgaagcccgcacgtcttttgcggggcccgccaaatctctcagtgcgacaccgattgaaaagacgctcatgatgacgccttccagcaccgctctgataaaatgctcccgtttatggcggaggctgatgccgaaaaacgttccgcgggcattcgggttccaaaacggcgcgcgctcccctgataaaaacggcagaaacagcaatccctcagagcctgcgggcactttatcagcaatatcaatcattaaatcgtacggatcaatgccgagccgcttcgccgtttcaacttccggagaagcgaattcgtctcgaagccagcgcagcataatgcctccgttattcgtcgggcctccgatgacccaatgcttgtcagtcagcgcgtaacagaatgtccgcgctttttcatccgtaatcggcgcatccgtcaccgaacgcacggctccgcttgttccgatcgtaacggccacttcgcctttgccgatcgcgccgactcccaggttggcgagcacgccgtcatttgcgccgataataaacggtgtatccgcatggatgcccatccgtgcagcgatttccggcgcaaggccgcgcagctgatgagtggtcggcacaatgtccgacagctgatcttcccggattccggcaatcctgagcgcttcttcatcccaggaaagcgtatctaatcggaacagtcccgttgccgaagcgatcgaataatcgacgacataagttccgaaaaactcgtgcagaatatattctttaatactgatgaatttggcggttttcgcgaatgtctccttgtcctgttctttcatccacacaattttggaaagcggagacatcggatgaatcggcgtacccgttcttttataaatatcaaaaccgttcatctcttttaaaatccgttttgattgctcggcgctgcggttgtccgcccaaatgatgcttttggtcagcaggccgccgttttgatcgacagctatcaatgagtgcatggcggtgctgatgccgattgcaagcagattgtcaggactcagtccggcctttgtgacggcgcccctgatgcttccgatcaccgcttccaaaatgtgctcaggatcctgctcggcccatgccggctttggctgtattaaatcatagtgaaccgaatgcttggctaacactttgcctcttggtccgaacagaacagctttcgtactggtcgtgccgatatccagaccgataacagcttgggtttccttcataatatatcccgcctaatctgattgaataataagatagatttataatgtatgcccttacaaagtcaattataggaataatttttttataaatcaacgatgaagaagaaaaattttttcataaaattgcctcaattcccgctgtatcggctttctctcttttgaaaaaaatatttagaaaacgattacaaacgtttgtgcgcgatcatttttctgatttgctgcaagttggcgagcgttttctcctgccgcagccgggccgtggcgaaatacagtgtatcaatgaccgacagctgggcaagccttgcggacatcgcctccgttctgaaagccgtctcccttgttgatgtatacagcacaacgtcggaaatctgggtgagcggcgacttttggtagcttgtaatgccgatcgtgccggcgccgagcgatttggccgttttgaccgcgtcgagcacgtccttgttgctccccgaatgagaaatgccgatgactgcgctttcaggaccgagaagacccgctgacatcgcctgaaagtgagaatccgtatgcgcgatgcaatttatacccgtacgcataaatttatgatacgcgtcagtggcgatcagcccggaaccgccgtttccgtaaaattcgattctgtctgcgcggtggatcatttctaccgctttttcaacgtcggccggatctaataattgaaaggtatcggtcagaccggaaatgtttgtgcggaaaactttccggatgatgacttcgatatcgtcgtcggggctcatttcttcatgaatgtgctgcaccggctcctgaacgatctcctgagccagcgcgatttttaaatcctgatagccggaaaaaccgagccgcttgcacagcctgaaaatcgtcgcttcagagcttttcgttttttcggccagctgaatgatggaaaggtgaaccacgtctttcggttccttcacgatatggtctgcaatcgctctcaattttggcgacaaacctttgctggccgcctgaatcttcccgatgctgcttgaattcacaggggtcatactataacctccctactcgaatgtaaacgcatacttttatgataaagcaagtttcaatataaggaaaacagaattttaaaattgttttttcaattttgtgtgtaaaaaaagagaaaaagccgccgatgatagaaagtgaggaggcatctgaatgaaaaaagcatggattctcgtcatatcattcggcattgcgcttgcgctgtttttatacgcaaacacaaaggtgaaagcggaaagcatggcgccggaaagcaaagccttgtgtccggatttcagctgaaatttccgaatcaccgggaaggacaatagacggaaaaaattagtattgactttgaaaatagaagactgtatattatgttactatattcagaaaataaaaactcaagagattcatttaacataaaacactgtgaacgggagcagtaagagaatccagtcagaaaaagagagccgcgggttggtgaaacgcggactgattgttctttgaactcgcccggaagtggcagggcggaacggaattgtcggaatattccctatgtcctaacggctgaccttcgttaaaaggtttttaagctggattccggatattcgggatcaacaagagtggtaccgcggctgcctgaggcacgccgtctcttttcctaaagaggcggcgtgcttttttatgtgatgaacactttttgcgagagggcgtgtgatagatggaaaaggacaagcaaacgttaaaacggacgatgtcgtccagacacattatgatgatggcgcttggaggcgcaatcggggccgggctctttaaaggcagcagcacggcgattgatgaagcggggccgtccgtgctgttggcctacctcctcggcggaatcattctgctgtttattatgcaggggctggccgaaatggccgtcagaaacaaacatgcaaggacgttccgtgatttggttcagcagtctctcggttcgtacgctgcatactttttagactggatctattggaaaatgtgggtgctcaatattgccgcggaggcggtcgtagccgccattttcattcaatattggctgccggaatgtccgatatggatactggctttgatcatttccatcgtggtgacggtcgtaaacatgctttctgtgaaactgtttgccgagacggagtactggctcgcgctcattaaaattacggtgattgtcatctttattttatgcggaattctgctattatttttctcattcggcaatcacacggcgccggggctgtctcatttaacggatcacggagggtttttcccgcatggagcggggggcgtcattacggcgatgctcgtcgtgatctactcatacggcggaacggaaatcatcggcgtcacgctggcggagacaaaaaaccccgaaaaggtgattccgaaagctgtccgaagcacgttaacgcggattgtcgctttttacttgctgccgtttttcatcatcgtcagcctgattccttggaatcaagtcaacagcgttcccgaaagcccgtttgtcatagtatttaagatgatcggaattccgggtgccgaccatattatgaatgccgtcattcttcttgcgattatctcgtctatgaactcgggactgtacggatcatcccgcgtcttatttacgcaggcttctgacggccgggtgccgaaaatcttttcaaaactatcgaagaaaaaggttcctgtctatgcgattctgacttgtacgtcatttttatatgtaggcgtcctgatttctttattcgcaggaagccggacgtttaattatttgatgggttccctcggctataccgtgctgttcatctggctgattatcggattcgcccatttaaaatcaagaaaacattcaacagaacagccggcttattacgtcaaatggttcccgtacacgacatggttcgcggtgcttgcgcttttggccatcctgatcggcgtaattgcgacgacgtccatcgtcatcacatgcatcactgcggccatctacctgctcattacggctgcgtatctcgtgaaagggagacgtcaataaataaaaaaactcttgccccgcggcaagagtttttttaatgaacggcctttttttctgcggccagagcaggtgttttcagtttcttcggtgttatattcacaaaacaaatgcttgtgacgatcagaagcagtccggctaaaaggctgacggtcagcggctcatgcagaaatatcgagctgacgacaatggatatgagcgggatcaggaaggtgtaagaggcaaccttgcttgcttcccctgaaccgacaagcgtaaaaaaggcgagccagccgagtgcgatgacaaataccgaaatgaacagaaggctgagaatgaacggagttttccattgaatcgctgaaaagctttctgaaaaatggccggagctgacaagcagcacgccgccgatcagaagctgaagagcgaccatccagatagagtccgcgcgtccgcccgttcttttcacatataccgtgccgagcgcccagctgaccgcggagcccagagccaaaagaatgccggcgatggaaatatggcctccgaaaccggctgcgctgatgacggcgacaccggcaaagcccagaataagaccggctatttttaaaggatacatcgattccccgagccacagccaagaaaaaacgcccattaacaccggctggaaaaacacgatggctgaaaataagccggcatgcaggtaattcaagccgaccgtttgcaggccgtaaaataaagtaatatttaaaatggcagaaataagatagatcggccacgtttctttaaaacgcagctttttaaaacggggcagcgccaccattaataatagaagtccgccgatcagcgtgcggattccggcaaacagaagaggcggcgaataggcgagcgcggcttttgtcagcggccagttaattccccataccgtgactagaaacgccagcataagagccgtctgtattttcgaaagctgtttcacgtcgttcactccttgtagaacaattccatcatatgatacggtaatcagtaagataaataaaatgaatcttttttataaggagcataagtaaaacgttatgacgattacacaactgcgggtttttgttcaaatcgctgaaacgggaagctttacaaaagcggggcaggcgctgaatatgacacagcccgccgtaagccatgccatctcggcgcttgagtcagagctcggcatcaagctgatcatccgcgagcgccgcaacggcgtaaggctcacggacacgggcggaaaaattctcgttcatatcagagaggtgctcaaaggcatagaaaaagccgagcagctggcggccgcggaaagagggcttgaacagggaacgattcacatcggcacatttccggccgcttccgcttatttcattccaaaactgatcagcgtgtttaaaaaacggtatccgaaacttgagttggtgctttatgaaggaacggttaacgaagtaaaggaatggctccgctcccgggtaatagatgtggggatcactctttttcctacggaagacatggaatatctgccgctgaaaaaagataaaatggccgtcgtgcttagaaatgatcatccgctttgcagctgtgagtcaattactctgaaagatcttgaccgccagccgatgatcatctgtgacggaggatacgaatcaccgtttattgatatgtttaaggaggcagggtctgtgctgactgccgcattcactgtttacaacgtcaatacgtccatcagcatgatcaaagaggggctgggaattgcgatattatcacaaatgtctatgtccggaatatcactgccggaaaatgtcgtgacaagggaactcaatcaggcggtgtaccgtgatgttctgcttgccgttccttctgtaaaagaggcttcattggcggcaaaactttttattcaaatcgcgcaggagctcacaaagaatgaataaaaaggccctaatgatcttagggccctgaatcttatcggttaattttaaaagagtttgtcgtattgacaagttttgaaccgctgaacgtagctttgacacgataataacctgtcttgcatccttttaaagagaatgacttagtcacccttactgagaaagaaaaggttgtttttttgcaagtcgtccatttctttccggactttcgctgtaagtataggtttcctttaaaggttcgatctgacggatacgctgtactgagagtaaaatcgacacttttcgcttttttcgtgtagtaggaggcatcggtaaatccgcttacatttaaatgctgctgagtgccggaataaaagtctgcggcatatgccttatcggtgtttccggtaaagaagattgctgccagtaaagctgttgtgagtgccattaagatttttttacgcatatagactatgacttccttcctattcaatatatgacatatgttaacattattggttctgttctttcaatgatatcttttcatttttatatcattctaggctcttcatatctgaatgtaatagattcattcatacagagttcactagtgacgaccgctgactgattgttcgaagatcatcgaatcaaattgtttaactcacgggaaaagctgtggtaaggtgtgtggtagagaccttgtttaagatctgcttacactaaaccataaaggagaaaacgatggctgaacatacattgaaagatactgcgttttccgtattgaatttatcgccggtcgtacaggggggaacggttgctgaatcgttccgcaacagcatggatttagcgcaccgcgccgaggagtggggctataaccgctattggctggcggagcatcataatatagaaggtgtcgccagctcggcaacggcggtgctgatcggccacatcgccggcggcacgaaaaaaatccgcgtcggttctgggggcattatgctgccgaatcattcgtcacttataatcgcggagcaattcggaacccttgaaacgttatatccggggcggattgacctcggactcgggcgtgcgccgggtaccgaccaattaacggcgagggccttaagaagaaacataaacagcggggaggatttcccggagcagcttgaagaattgagaaattacttcaaaccctcaggcaatgtgcgcaatcaagtccgcgccattccgggcgaagggctggacgtgccgatctggcttttgggatcgagcggcttcagcgcgcgtcttgcgggagagctcgggcttccgttcgcctttgcggctcacttctcaccgaaaaacaccgtgcccgcccttgagctgtaccgaagctccttccgtccgtcagacgtactggatcaaccgtacgcgatggtcggcgtcaccgtcattgccgccgatacggatgaaaaggcggagcatctggcgacatcgcattatcaaagatttttagacctcgtccgcggcacgccgaaccagctgaagcctcctgttgaagacatggatcaaatctggtcgccgtatgaaaaagcgatggtcaatgaacagctcagttcaacgatcgtcggcggaccggagcgtgtgaaggaaaagctggaaagcttcatccggacaacacaggcggatgaaatcatggtgaattcagaaagctttgagcatgccgacagaatgagatcatttgagatcatcgccgaattaaaaaacagctgagcaaaaaaagcaatgtgccgcgcacattgctttttttattcgccgatccgcctgacggaatttcggatgacgagttccggttcatacacgacgtcatccttcttcggttttttatgctctaagcagccgatgacgtattttgccgccgctttccccataatggatttcggatgcttgacagaggtgagcttcacctcggaaatctgggcgaaatgtgaatcatcatagcccatgattgacacgtcatcaggcacctttaagccgaattctctgagaagattaatcgtcttcagcgcaatttcatcattataacaaagaatggccgtcgggtatgatccgctgttttgctcaagggtatgcttaattttttgaagaagcacggtttctttttcttcagtcgtgtaagtcacgatcatgtccggagacggaaaaatcccgcgctcccggtgcgcctgaagatagccgttcatccgtttgacgccctgcgtgtcatccgctttaaagattcccataatgtgcgtgtggccgagggacatgacgtattcgcaagccatcatgccgcctttgacatcattgacggaaaagctcggtgcggccagctccgcataagaggcgttaatcatggcaaacggaatgccgtttttctccaggttgagatagtagccgatgttgggcgtctgcagcgcgcttttcgtaggctcgacaatcagcccgtctatatttttggacagcaggttttcaaggccccgccgctcactttctgtattgttgttggtgctcgtcagcagcatggaatagccctgttcgcttaaataagattcaattcccctgatgatgctcgggaaaatatagtctgatatgtacgttgtaatgacaccgatcgttttgtttgaatgcatggctgatttcgccgtgcgtgaagcgacaaaggtgcctccgccctgaacgctgtacagcaacccctgcgagaccaaatctccgatcgcctttctgatggtatggcggctgaccccgaactgctgcatcagctcattttccgtaggcagcttttcgtccggctgtatttttccctgattcagccatgaacaaatttcttcttttacttgagcatatttcggtagcatatcaattcctccaaaatgtatacggacaaattccagtataacatagtaagccctttcatcaagctgtaaaaataattgacagattgtgaaaaactgcttattctttatttgtacgtactaattttccttatttttagataaaattctttataagtacgtacaaatgtggcggttctgaagaaaacaaagcaactcaagcgccgcactttgttttgtaagcgtttttattctattattcgcgggagggtaaaattcatgaagaatcacccggcaccaattggctcaaatgtacctgtcactcggcagcattcgaagtggtttgtcattctcatctcatgcgcggccggactgggagggcttttgtacggttatgatacggcggtgatttccggcgccatcggtttcctgaaagatttgtaccgcttaagtccttttatggaagggctcgtgatttcaagtattatgatcggcggtgttttcggcgtcggaatttccggatttttaagtgaccggttcggacggagaaagatattgatggcagcggcgctgttgtttgcggtgtcagcggttgtctctgcgctttctcaaagtgtgtcttccttagtgatcgccagagtcatcggcggtctgggaatcggcatgggctcctcgctttctgtcacgtatattaccgaagccgctccgccggccatacgcggcagtctttcctcactgtatcagctgtttacgatattagggatctccggcacttattttattaaccttgccgtccagcagtccggctcgtatgaatgggggtgcacaccggctggcggtggatgctcgcttacggcatgattccgtccgtcatcttttttatcgtgctgcttatcgtgccggaaagtccgcgctggcttgcgaaagcggggcgccggaatgaagccctcaccgtgctgacgcgcattaatggcgagcagaccgcgaaagaagaaatcaaacaaatcgaaacgtctttacaattagaaaaaatgggttcattgtctcagctgtttaaaccggggctgagaaaagcgcttgtgatcgggattctgctggctttattcaatcaggtcatcggcatgaacgcaattacgtattacgggccggaaattttcaaaatgatgggcttcggacaaaatgcggggtttatcacgacatgcatcgtcggtgtcgttgaagtgattttcaccattatcgcggttcttttagtcgataaggtaggccggaaaaagctgatgggggtcggatctgcctttatggcgctgttcatgatcttaatcggggcatccttttattttcagctggcgagcggtccggctttagtcgtcatcatattgggattcgtcgccgctttctgcgtatcagtcgggccgattacgtggatcatgatttcggaaatctttccgaaccacctccgcgcacgcgccgccggtattgcgacgatattcttatgggggccaactgggcgatcggccagttcgtgccgatgatgatcagcgggttggggctcgcgtacaccttctggatattcgccgtcattaatattctctgtttcttgtttgtcgtgacgatctgccccgagacgaaaaataaatcattagaagaaatagaaaaactctggataaaatgaaagcgttttacggcaaaagtccgctgcggcgggcttttgtctgtcaccttcattccgtttctgtatataatgactgtatcaaggagatactggtaaatcctgcgaagaatgtcgaggaattgacctttaacagttgaattaacaatgtcatcctgttaaaataattaaagaaagcagacataattttttttggctatgatgggacgttttttgtcatagcgggacattttctgtccagtatgaataggaaggaacgtttgagtcatgaaccagttaatacaagctcaaaaaaaattattgcctgatcttttgcttgtgatgcagaaaagatttgaaatcttgcagtatatcaggcttacagaaccgatcggccgcagaagtcttgcagccagtctcggattgaccgagcgcgttctcagaagcgaggttcagttcttaaaagaacaaaatctcatcgatattaaaacaaacggcatgacaatgacggaagagggctattcactgctttcgattctggaagatacgatgaaggatgttttaggattgacgcttttggaaaagacattaaaagagcggctcaatctgaaagacgccattatcgtttccggagacagcgaccaatctccttgggtcaaaaaagaattagggagagcggccgttgcatgtatgaaaaagagattttcaggcaaaaatatcgtcgctgtaaccggcggtacgacaattgaagccgtcgccgatatgatgacgccggattcaaaaaaccgcgagctcctgtttgtgcccgcaagaggcggtttaggcgaagatgtgaaaaaccaggcgaacaccatatgcgcgcatatggcggaaaaggcttcaggcacttaccggcttttgttcgttcccggccagctgtcacaaggcgcctactcatctattattgaagagccttccgtaaaagaggtgcttcacacgattaaatcagcgagtatgctcgttcacggaatcggcgaagctagaacaatggcggagcgaagaaacacgcctttggaagatttgaagaaaatagatgacaatcatgcggtgacagaggcattcggctactactttaatgcggacggagaagtcgttcacaaggtgcattcagtcggaatgcagctcgatgacctcgatgccattcccgacattatcgcggtagcgggcggatcatcaaaagcagaagcaatcgaagcttattttaaaaagcagcgaaacacggttctcgtcacggacgaaggagccgcaaagaagttattaagggataacagtccctcaatataaatatctctcacttatttaaaggaggaaataatcatggcagtaaaagtcggtattaacggttttggtcgtattggacgtaacgtattccgcgcagcattaaacaatcctgaagttgaggtagtagcagttaacgatttaacagacgctaacatgcttgctcatcttttacaatatgattccgtacacggaaaattagatgcagaagttaaagttgacggcagcaaccttgttgttaacggcaaaacaatcgaagtttctgctgagcgcgatcctgcgaaactcagctggggcaaacaaggcgttgaaatcgtagttgaatctactggtttcttcacaaaacgcgcagacgctgcgaaacacttagaagcaggcgcgaaaaaagttatcatctctgcacctgctaacgaagaagatatcacaatcgttatgggtgttaacgaagacaaatacgatgcggctaaccaccatgttatctctaacgcatcttgcacaacaaactgccttgcgccgtttgcaaaagtacttaacgacaaattcggcatcaaacgcggtatgatgacaactgttcactcttacacaaacgatcagcaaattcttgatcttccgcacaaagactaccgtcgtgcgcgtgcagcagctgaaaacatcattcctacatcaactggtgctgctaaagcagtttcccttgttcttcctgaactgaaaggcaaactgaacggcggagctatgcgtgtgccgactccaaacgtttctcttgttgacctagttgctgaacttaacaaagacgtaacggctgaagacgtaaacgcagctcttaaagaagcggctgaaggcgatcttaaaggaatcctcggctacagcgaagagccattagtatccggagactacaacggcaatgctaactcttctacaatcgatgctctttctacaatggttatggaaggcagcatggtaaaagtaatctcttggtacgataacgaaagcggctactctaaccgcgttgttgaccttgcagcttacatcgcaaaacaaggtctttaattcatagctcccggaaagggccggacttggttctttcggacagaaacgctataatgaaagcggacaagggaaggggacggactccctttccctttttccatgagaaccggctttcagaaagcgccggattgctgcagaacgtccgcgttttgaagtttccgcggcactttcgttttctgagccgcctgccctggctcagaagacgatctgccccgtgcccggaagctgcaatctgccccgcggcggaagcatcatgaggcggtttcacgtttcacgtttttcgtgctatgcaaaccattttgaaggaggatctcctaaggcatgaataaaaaaacagtaaaagacatcgacgtaaaaggcaaagtcgtattctgccgcgttgactttaacgttccaatgaaagacggggaagtaacagacgatactcgtatccgagctgcgcttccaacaatcaaacaccttgcagaccaaggcgcgaaagtccttcttgcgagccacttaggccgcccgaaaggcgaagtggttgaggagcttcgtttaactcctgtcgctgcacgcttaggcgaactgctcggaaaagaagtgaaaaaagcggatgaagcttacggcgatgctgtaaaagcacaaatttctgatatgaaggacggagacgttcttgtattggaaaacgtacgtttctaccctggtgaagagaaaaacgatcctgagcttgctaaagcatttgctgagcttgcggatgtatatgtcaatgacgcattcggtgctgcccaccgtgctcacgcatctacagccggaattgccgagcatctgccggcggttgcaggattcctgatggaaaaagagcttgacgttctcggcaaagccgtgacaaatcctgagcgcccgtttacggcaatcatcggcggcgcgaaagtaaaagacaaaatcggcgtaatcgaaagtctgcttgataaagtggacaacctgatcatcggcggaggtcttgcttacacattcgtaaaagcgcttggctatgaagtcggtaaatctcttcttgaagaagataaaatcgaacttgcaaaatcattcatggaccgcgcgaaagaaaaaggcgttaaattctatatgccggaagacgttctcgttgctgatgatttctctaacgatgcaaacgttcaaatcgtgccgatctctgagatcccaagtgatttagaagcgatcgacatcggaacgaaaacccgcgaaacgtacgctgaagttatcaaaaacagcaaacttgtcgtatggaacggacctatgggcgtattcgaaatcgacttgttcgctcaaggcacaaaagcagtggctgaagcattggcagaggcaaacgatacatactctgtcatcggcggaggagactctgcggcagccgttgaaaaattcggccttgctgacaaaatgagccatatctcaacaggcggcggcgcatcccttgaattcatggaaggcaaagagcttccgggtgtagctgcgctgaacgataaataaaaactgctataaggaagtggaacagatgagaaaaccaattatagccggtaactggaaaatgaacaaaacactcggcgaagctgtcagcttcgttgaagaagtgaaatcttccattccagcagcagacaaagcggaagccgttgtttgcgcaccagctcttttcttagaaaagctgacttctgctgttaaaggaactgacctgaaagtcggcgcccaaaacatgcattttgaagaaaacggtgcgttcacaggtgaaatcagcccggtcgctctgaaagaccttggcgtggattactgcgtcatcggccactctgagcgccgtgaaatgttcgctgaaactgatgaaacagttaacaaaaaagcgcatgccgctttcaaacacggcattgtgccgatcatttgcgtaggtgaaacgcttgaagagcgcgaagccggaaaaacaaatgatcttgttgccgatcaagtgaaaaaagggcttgcgggtctttctgaagagcaagttgctgcttccgttattgcgtacgagccaatctgggcaatcggaacaggcaaatcttctacagcgaaagatgcaaacgacgtctgcgcgcatatccgtaaagtcgttgctgaaagcttcagtcaggaaactgctgacaagctccgcattcaatacggcggcagcgtaaaacctgcaaatattaaagaatatatggcagagtccgatattgacggtgctttggtcggcggcgcaagccttgaaccgcagtcattcgttcaattattggaggaaggtcaatatgagtaaaaaaccagctgcactcatcattcttgatgggttcggattacgcaatgaaacagtcggaaacgcagtcgcacaagcgaaaaaaccgaatttcgaccgttattggaaccaataccctcatcagacgctgacggcatcaggcgaagcagtcggactgcctgaaggacagatggggaactctgaagtcggtcatttaaatatcggcgccggacgtattgtgtaccaaagcttaacacgcgtgaacgttgccatccgcgaaggcgaattcgaacgcaatcaaacgttccttgacgccatcaaaaacgcgaaagacaacgacaaagcgctgcacctgttcggccttctttctgacggaggcgtacacagtcacatcaatcatttattcgcgctgctgaaacttgcgaaaagtgaaggactgacgaaggtgtatattcacggtttcctcgacggccgcgatgtaggtccgcaaacggcgaaaacttacattcagcagctgaatgagcagatcgaagaaatcggtgtcggcgaaatcgccagcatttccggacgctactactccatggaccgcgacaaacgctgggaccgtgtggaaaaagcgtaccgcgcaatggcttacggcgaaggcccgtcttaccgcagcgcgatggatgtagtcgacgattcttatgcgaacggcattcatgatgaattcgtcattccgtccgtcatcacaaaagaaaacggtgaacccattgcgaaaattcatgacggcgattctgtgattttctataatttcagaccagaccgcgccatccagatttcaaacacgtttaccaacaaagatttccgcgatttcgaccgcggtgaaaatcatccgaaaaacctgtatttcgtctgcctgactcacttcagtgaatctgttgacggatatgtggcttttaaaccggtaaaccttgacaatacggtcggtgaagtattagcacagcacgggttaaaacagcttcgcattgcagaaactgaaaagtatccgcacgttacgttctttatgagcggcggccgcgaagaagaattcccgggcgaagagcgcatcctcattaactcgccgaaggtcgcgacatatgacctgaagcctgaaatgagcgcgtatgaagtgaaggatgctcttgtaaaagaaatcgcggctgacaagcacgacgcgatcatcctgaactttgcaaaccctgacatggtcggccactccggaatggtcgaaccgacgattaaagcaattgaagcagtggacgaatgcttaggcgaagtggttgacgccattatcgctaaaggcggtcatgccatcattaccgctgatcacggtaatgcggacattctgattacagaaacaggcgaaccgcacactgcccatacgacaaacccagtccctgtcattgtgacgaaagaaggcgtgacgctgcgcgaaggcggaatcctaggcgacctcgcaccaacgttattagaccttctcggtgttgaaaaaccgaaagaaatgaccggaacatctttaattcaaaaataagcgtaaatcaaaaggagagacaaactcatgccatacattgttgatgtttatgcacgcgaagtccttgactcccgcggcaacccgacagttgaagttgaagtatatacagaaacaggagctttcggccgcgcattagtgccaagcggagcttctacaggtgaatacgaagcggttgagcttcgtgacggcgacaaagaccgttaccttggaaaaggcgtgttaactgctgttaacaacgtaaacgaaatcattgctccagagcttctcggctttgacgtaactgaacaaaacgcaatcgatcagcttttaatcgagcttgacggtactgaaaacaaaggcaaactcggtgcgaacgcaatccttggcgtatctatggcttgtgcgcgcgcagctgctgatttcttacagattcctctttaccaataccttggaggattcaactcaaaaacgcttcctgtaccgatgatgaacatcgtaaacggcggagagcatgctgacaacaacgtagacattcaagaattcatgattatgcctgtaggcgcgcctaacttccgtgaagcgcttcgcatgggcgctcaaatcttccacagcctgaaatcagttctttctgctaaaggaatgaacacagctgtaggtgacgaaggcggattcgctccgaaccttggttctaacgaagaagcgcttcaaacaatcgttgaagcaatcgaaaaagccggcttcaaacctggcgaagaagtgaagcttgctatggatgctgcatcttctgagttctacaacaaagaagacggtaaataccatctgtctggcgaaggcgttgtgaaaacatctgctgaaatggttgactggtacgaagaaatggtttctaaatacccaatcatctctatcgaagacggacttgacgagaacgactgggaaggccacaaacttcttacagagcgtcttggcaaaaaagttcagcttgtcggtgacgaccttttcgttacaaacacgaaaaagcttgctgaaggtatcaaaaacggcgtaggcaactctatcctgatcaaagtaaaccaaatcggtacattgactgaaacattcgatgcgatcgaaatggcgaaacgcgcaggctacactgccgttatctctcaccgttccggtgaaactgaagacagcacaatcgctgacatcgctgtggcaactaatgcaggacaaatcaaaacaggtgctccgtcccgtacggaccgtgttgcgaaatacaaccagcttcttcgcatcgaagatcagttggctgaaactgctcaatatcacggtatcaactctttctataacttaaataagtaatgtaatggacgccgggagaatatctcccggcgtttttttatggtcccgggcttttccctcctttttcatcatcttcatttggtcaataatattcatttttcccctttttaaaggaatcagtgttcttcaatcgaaagggaagaggtgttaataagaggagggattatgatgaaattttcatttatgtcagccgcggtggcagcaagcgtcatatggggcgcgtctgccgggccgctgtccgaaactcatgcttattcaactgtgaccgcgccggtttttgatgctgatgaggcattggacactatgcatgatctgagtgaaaccatcggtccgcgggaaaccggaactgcgaaagaaaaggaagcggctgaatacatatcgaatcgtctgcgggctcagggcgccagtgtcaaagtacagtcatttccattgaaaaagtacttttcaggttcagtcacagcgggagatcatgaattcccgctccgctccgctgatcaatccgctgttgaaaaagagctcaaaatagaaggcgggatttttgacggcggctgcggatcacgcaatgacgtaacaggagccgaaggaaagattgcagtgatacgcgaaggaaagatccctgtttctcaaaagatcaaacatgccgaacaagcgggagccaaagcagtcattatttataatcagacaacaaaaccgctcgccgtccgtccgcataccgataaaggaatcacgataccggcggcgggtatgaaaaaagaagacggtgaagcattgcttcaggaaaagaaggcagtcattcaatttaaaaactataaaaaccgcacctcacaaaatattataggaacgcgcaaagcggcacaggccaactcttctgatgctgatattatttatgtcacagcgcattatgacagcgtaaaaggcgcgcccggagcggatgataacgcctcaggcacatctgccgttctggaaatcagcaagcaactcaaacatataccgaaagacaaagagatccgctttatcctgttcggtgcagaagaattatggtctgcgggttcatcttattacgtcagtacactcacgaacaatgaaagaaagcacagccgggccaattttaatgccgatatgattgcgactgactgggaagaagcgagtcaaatgtgtgtcacgactcctgacggcaggaaaaacccgagtgtccggtatgctgaaaaagccgctgaaaaatcccggttggtcaagccaaacctgattcagctcggttactcagaccatgtctctttttatgaagcggggattccgtcggctaactggatttggctcagccccgatacacaggagccggggccctggtaccacaccgaaaatgataatatgaaacacatcagcaaagaacggctagagaaagctggagcactcgtttccgcggcagtaactgaggcaatgaaggaataaaaaacaggcttcggcctgtttttttatattattttctgtatattctatcaattaagggagattttctcactcgttaccagatatataccatttaacaggattttattttacaaataaaagaaaaataaatagataatacctaattcacaaaaggatgtaaaactcatttatcaaattttaacttttgttataattgcgatatcgatcgatatttgttttaaattgtaaaaaacaatactcttttctatctattagggggcgaaaaatgaatactgtcacaaaagaagccagcaaccttggtcaaaaacggctgttacatctgattgaaacgaagcaggcgatagtaggcgtgttaggcatgggatatgtgggatttcctcttgcgctggaatgtgtcgataaaggatacaatgtgatcggatttgacaaaaacagtgaaaaggtttccttgttagccgccggaagcagccatattcaagatatagaggacggcagactgaactcggctttacaaacaaaacgctttcaaatcagtgccgacatgtcgctcatccaaaaatgcgacatcattgtgatatgtgtgccgacacccctgaacaaaaaagacaagatccccgatttaacctacatcgacagtgcagttgacagcatgatcgcttatggaaggcagcatcagcttttaattttagaaagcaccacctatcccggaacaacgaaaaaaaagattgccgacagaatggcatcaagccgcggcatgaaaataggaacagacttttttacggcttattctccggaaagaatcgatccgggcaacaggcaatatgaagtttcagatattcctaaagtagtcggcggaaccacacagacttgcacagaacttgcctcagcgttttacaacaccattgttacaagcattcacccggtcacctcacccgaagtagctgaaacagctaaactcctagagaatacttatcgttatgtcaatatagctcttatcaatgaaatggcgcttaattgccgtgaacttgatattgatatatgggaagtcatctgcgcggcggacacgaagccgttcggctttcaaaaatttatccctggccccggagtcggaggccattgtatcccgattgatcctttttacttcaaatggatcgcgaatgaaaaagggctgcagacaaaattaattgatctggcggacgaaatcaattctaacatgccgatttctgtctctgactatgctttgaaactggcgggcaaagacaaatgcagcatcttaataataggggccgcttataaaaaaaatacaaatgacccgcgtgaatcctcagtgtttacgataatggaagaattgatggacaagggatgcgcgattgattatcatgatccgtttatcagcgagatccgcttgaatgacggaagccgcaaacaatctgtccctttcacaaaagaacaaatcaatcagtacgacgtcatcatcattcatacagatcacgatgtaatcgactacagtattttgaaggatgcctcaccgattatctttgacacaagaaatgtatgcagggaaaaatcagccgacaattgcagagttgtcactttataggagggaacggtcattagtaatcgatttatctcttttcacagacctgatatgacaaacgaagaaatcgcaagcgtaaccgaaacgattcagtcgggctggatttcgaaaggcccgaaggtaatcgattttgaaaaaaagctgggagaatgtattggagccgaacacgtcatcagctgtaattcaggaaccgctgcattacacatggctttattggcgctcggtgtgggagaaggcgatgaagtcatcgtgccgagcttcacgttctgttccagcgtcaatgtcatcctgcacgccggagccgttcctgtgtttgcggatatatgcgagaaaagtctatgtgccgatcctgaagatgtcaggaagaaaataacgccgcgcacaaaagcggtaattgcggttcattttgccggctatccggctgatctggaaaacttgcagtccatttgtaaagaaaacggattgtatctgattgaagacgccgctcatgcgctcggtacaaaatataacggaagcatgatcggcactcacggcgatgccgtgtgcttcagcttttatgccaccaaaaatattacaacgggggaaggcggagccctcgtcatgaaagacgaacaggccgcagaaagagcgaggctgtacggctggcacggcatcacaaaaaatgcctggaaccggtacggtgaaaaaggcagctggagatacgacgtgttactgccgggctttaaatataatatgacggatattcaggccgcgctcggtctggttcaattgaagcgcgcaaacgaaattcaagaaaaacgggcacagatcgctcaattttatgtacgtgaactgtcgggccaatctgacaaagcagcgcttccgctttctgacattccgaacggcataacgcactcatggcatttatttattttgcggatccgagagaacggcggcatggacagagatctgtttattgagaaaatgaaagaaaaacagatcgggctgagcgtgcactttattcccgtgcatatgcatccttactatcaaaaacattttccggccgagctgccggttactgaacgtgttttccgggagatcgtgtcactgcctctttacagccagttatcagatgaggattgcagctatattgtcaagtctataaaagaagttttgactatcagccaggaggtaggatcatgaaacatattgcgattatcggaggagccggttttatcggaagcgaattggcggcattattacaggctaaaggttatcacaccattattgcagaccaaaaggagccggcttttgacactgaataccgccaaacggatatccttgatcggacgtccctccgcgaatcactgcggggagcggatgcggttgtccatttggcggcaatggtcggtgtagacagctgccgaagcaatgaagaagacgtcatacgggttaattttgaaggaacgaaaaatgtcaccgaggtatgcggtgaattgggaatcagaacacttcttttctcatcgagctcagaagtattcggagattcacctgattttccttataccgagacaagcagaaagcttccgaaatcggcttacggaaaagccaaactgcaatcagaggaatatttgagagaacaggcttccgacaagcttcatattcgggtcgtccggtactttaatgtatacgggccgaaacagcgcgaggattttgtcatcaacaagtttttcagcctggccgagaatggctctgagctgcctctttacggggacggcggacaaatacgctgcttcagctacatcagtgatatcgtcaccggaacttatctcgcgctcattcatgaaggagccgtctttgaagactttaatatcgggaacgaccagccgatcacgataaaagaactggctgaaaaagtcaatgtgctctctggcagagagaaggataactatctgtttaaaaagctgggcgaagacggcgtgaggggaaaagacatcgagatttttaaacgggcgccgtcaatcgagaaggcgaaacgtttactcggttacgatccaaaagtaagtctgaatgaaggcctggagatcataaaagatgaaagacaaaagcacaaactttcactttcctgaaaacccggaagtagtcaaatatcccgtttatcccggacagctttccgtcagggaccgtctgcgcgcggtgaagcacttgcttactggcggacaaagcggactgactgaaaaactggaaaaacggtacggaaaaggggttgtgctgacctccagcggcagtgcggcactggtgctcgccttaacttattcgggagccgggccggggaaagaagtgattttctcatccttcagctgcccgaatgtcattgatgccgtattgcaatccggtgcaacgcctgtttttgcgcagctggatgagcatctttctttatcgtttgaggatgtcaaaaaaagagcgacgcggcagacgtgtgcggttatcctcacgcacgtatacggccggagagaaaataccgccatcattgactgggcgaaggaacacggtatttttgtcattgatgatgccgctcaagccatgtttacaaaacaagcggatacatatgccggcggtctgggcgatttcggtgttttaagcttcggcccgtcaaaaccgcttgcgagtatcggaggcggcgcgttaatcgcgccgaaagaatggcttcggcaaaaagcaaatttcccgatggaacagcgcagccaagtggcagctgactatcgaatttatatcagaaatcaaagaatacaggctgttatgaaacggaaacggcatcatcccgtttcatatatttataggaaagcgggcatcatgccttccatgaaagccactaagctcgaagctctgccggataaaccggctgttgtaccggtgcttcgcatgcatccggcaagggaagccattattgaagatcagctttcacttatggatcagcttgtaacagcttcgctccgaaacttacaagcggcgggagaaatctttataaaggcggaagagacgtacggcataaagatgatccagccccaagaaggagaacatctgaattatttaacgattgtattcccccgggatgaagagcggtacgggtgttccgtttatttagctgaaagaggcatccaaacatgctggaactatcttcccctcggacgtattccgatttatgaaacatatgcggcggaagaaggggaagatccgctttggaaaagagttctttctctgccgtttaaacctcctcttcaaaaggagcaagtcagatatatagccgaatccgttttatcatattgtgagcaaaagaataagactgaatagtggtgataacaatgcaaaaaacagcagtatgcacgagccgccaggcatgggatcgggccgctgacatgtatcaggcggggttgtttcaaagctatgattggggaattctcatggaagagcttcccggcacgtcatttcaccctgtcagactgacaacggacggaggacaggtcatctatcttccgctttttgaacagaagggcgtattatccggcaatatgatcggatacggcggcgttatttcagatcgccccatctcatttgaatggcttcaaagtgaaatcgaggccatattcggccggaacatatcccggatgctgctgccgtacggtcagacttcttttacagaagaaatcggggaagggtggacggaaaaggcgacacggattcttacgcttccggacacgtttgacgaactttggacgggcatttccggaaaagcccggacggcagtcagatacgctgaaaaagagaatattgtcaccaggctgatcgggcgacaagaacttgaatcattttacgacctctacaaggagcatacggcggcaatcggcgctgcttatgtgctgagccaaggatttttccaaaaactgcttgacacgtttggggaccggatgttttgggtcggagcatatcaggatgagacgctgatcagcagcagtatttttctctatgaccgctctcatttctattattggcagaatgtaaacagcctggcgggaaaaaaagcgcaggcctcttacttgttgatgcgtgacgctttgcaattcgccatttgccgcaagcttcaatgggctgattttggctattcacacagtaaagaaatcgcaagaccgaaacgatattggggagctgaagaaaaacaatgccgactttttacgaaaccggaatgaaaacaataagcggccatcaatccagttatctgccgtggtacggtttttttgaaaaaatgtataagtcggatctgtttgccattcatgacacggctcaatttgagaaaaaagggtttctgaaccgcaacagaatcaaaacgccgcagggccccagatggctgacggtgcctttgcagatgaaacaatataaagacatagagcttcggcatatgaaaatcgaccagacacaggattggcggaaaaaacattggatggcgattaagatgaactatgcgaaagctccctattttgagcggtaccagcatttttttcaagatgtctatcagagggagtgggaatatctccatgatttgaatatgcacatcattgaatttttccgaaaagagctccgaatcgaaacgccgctctgttatgtctctgagcttgaatgccggaaggagaaaaaaagcgattttgttttagcgctttgtcaggagctgggggcggatcgttattattcaggcagtcagggttccgactatttaatagaaagcgattttgaaagaaacggaattgtcattgagtatcagcagatccggcattttgactatcctcaattattcggggagcatatccctcacctctccatgcttgatatgctgatgaactgcggagcggatacagctgaaatgttagttaaaggagggcaatatgatgaaagtaatggtatttgcagcgcatcccgacgatgaaattatcggcgtcggcggcacgctcgccaaacatgtccgccaaggtgacagcgtgtcggcagtcattatggcggaaggcaagtcatcaagaaaaacggattatgagaagcctgaagagtctgttatgcagcattctgctcaagaaacggaacaagcgctcagcactttgggcatccatgattttgtcaggctgaaccttcctgataacagaatggattcaatggatttgctggatgtcgtgaaggaagcggagaaacaaatcaatcgttttcagcctgacattgtgtatacccagtacggcggtgacattaatattgaccactccgtcgtattcagagcggtcatgaccgcaacccgtccgcttcccggccatacggtaaaacgggtttttgcctatgaaacattgtcttcgacggaatggaattactgtcagaaggatcagtttcatgccaatttcttcgttaatattgaagacgagcttgaaacaaaattgaaatcgatggcgtgttacggctccgagctcagagacttccctcatccccgctctttgcaggcaatcgaacataatgcccgtgtatggggagcaaaatcgggtttttccgctgcggaagcgtttatgcttgtgagaggaacatggtgactgtcctatgattgctcaaattccgtttttcggacttgatccgaagcaaatcgatgagaaatgggtggaagcgggatacggtctggaagcgaatatttttgacggccgctcctttagtgaagcggattatctcaaaacattcaatcagacgctggaatatgcaaaacagcttgatccttcattattgacgctgcatttcccgacagatcatgccgattatgtgcatgaagatcacatcaaaaaacagctttatcactttgcggagctcgctgtgaaatacggcgccaaaggcataaccgttcatgcgaatcaatttatgacggttgaggaatttcaagtgtatgacctggaaggaaaccgtaaaaaaatcattgagtttttcgcagagtttgatgagcagctgaaagggacggacatttggatcggtgtggaaaaccttccgatcatcgggaatctgggagaggattttgatccgattttcatttatcctgaggattttacagagctggttcagctggatctgaagcatgtcggtattacgtgggatctgtgccattgggcgattacctatcagactcacttgtcttccgcgcttatgttcagaaatgaccagctgagatacccggatttctttcagtttctctcgataaaagagagcattaaacattatcacttcagctcatttcgccagcttgcgttcccgcatggcggcgtccgctgttttgagggccgccatccgagtgaagggacgatcgctgaggagctgctgagacgggctgccgatactttgcaggagctttatcggaatcaagataccggcattgtatttgaggtgatggaagaggattatacggaaagacgggaatcatggagaacgctggaatggttcggcggtgtttctgatgccgaggatcaaaaaagggcctgatatgacatatcgaacaccgaactatgcaaagctttggtgtgcgcaggtgttttcttcagcggcggacggtatctggcttattgcactgccgctgttagtgctggaattgaccggcagtaaaattcttgtcggcgttatttcttttatcgaactcgtgccgttgacatttggcgtgctggcgggaccgctgattgatttattccgaaaaaagtcgatcttgtatttgtgcaatacgggccgggccgtcatcatgatcctcttggcggtgctcagcgcgaacgatttattaaccgtgtggatagcaggggtgtgcgccttttgtctatctctgcaatcgatgctgtttgcgccggcgaaagtcgcgatcattccgctgctcgtccgcaaacagcatcttgatcaggcgacatctctgatcaatacgagtgacttgatcggactcatcgtcggaaaactgatcagcggaatcatgattgcggctattccgttcgggctgctgtttgccataaacggaactgctttttttatctccgcggcatttatcgcgttcattcgtatttcagaacagcccaatgaaaaaagcaacggggctgaagatgtaaaagccggctacagaatgctgaaaggaaatgcggcatggctgacatcggtcggatactttttcgtcgtaaatctcgtcattgccggtcttatttcagtaatggggccgattcttgctgtggaacgttttcagcagaactattctgtatggtttgccgtcatgtattcaatgtttcaggcggggatgcttttgggcaatctggccgtatttttcaaatggaatacaaaacgcttgaaccggctgtatccgcggacgttaacggcagcgggactgctcattttggtgctgttttttccgcttcacgggtttgagtgcatcattttcctggtgcttggcatcatcatctcgtatattgatgtgcaaacggtgctgtatttccaaaagacggttccggccgcatatttcggaagggtttttgcactgattttttccattgtcaaaatgggtgaaccgctgtctgccgctgtctacacagggcttctgctgttgatgaatgcggattatatttttgcggcggtcggactgacccttacgatcgtttttgctgttttttcagtcagacaagggagtcaaagaaattcagagaaacaagcggatcaatccgtctgaatggtaaacgaaggtgcgccggtatcagccggcgccctttttatcataaatccaaataaagccgtatcatatccaggcattgaatgccgttttcaaaaatgtcttcatcataatgtctgataaaaaaatcatggtcgacagcctgaatgcggaatccgcatttttgatagagtgacagctgatgaatactggaatttccggtgccgatttcaatcgtgtcagctcccgattgtctcgctttttcaatggcatcttgcaccagctgttttccgaatcccctgttctgcagcgattcttttaccgcgatgtttacgatttctatcgttttaggccttgtttgcaataaaacgtaaacccctgcaagctcgtctgacgtccaagccgtatagcattctcctcttacaagataatcatcgacaatctctttcgacggatcggccagcagcaatagttcatacagcgcttcatccggatccgcggcttttcggatgctcagtttttgcatgtccgtttctcctcctccgttatgatcgacagctatttttcaaaataactccaaaatcattctactttattataaaatatgaaacataggaaaagttatacaagttttgtagattgaataggaggaaagtcatgtttttttgtaagtattgcggccgacagaacaacgaagaggcgcatttctgtaaagaatgcggaaaaccgatcgggaaaggaagccggcttgaacggcaggcggctgtaagagcggctgaacctgcttcacaaatgagaaagccgatccctaaaaaaacgctcttcatatggggcggcatagccgcagcgctgatcttattgattgccgcatataaaaccggagcctggctgacatctgaaaaaaggctcacggatcaattcgaacaggcggttcatgacggggacacgaaaaagctcgcagccctgctcactccttcagacaaaaaactgaagctgaatgagaccaatgtcaaaccgctccttgcatacgcaaagaaacacgatgaactgctggaaacgcttcgcggcaattcatcagaaaaagatgcggtatacgtcaaaaaagagggtaaaacccttcttttgtttgaccattacgaactgaaagtcgatccggtttatttccgcgtcaccagcaattataaaggcgccgatctttatatcaacagcgagaaaacagggacggtcaaaaaagccgatgaaacccaaatcttcggcccgtatgcacccggtgtctacacggcggaagccaagcttaaaaatgacacggttgacgttgtcaaaaagcaagaggcagaggcggccggcagccggaatgttgattttgatctgccgttagacgccgaggatgtgacgttcactccggcagacagcttcaaaagcgcgaaaggcgatctgctgataaacggcaagtccgtccataaagatccgtttacatccgttacatacggtccgctcttaactgacggttccatgacagccgccgtggaggctgattttccttggggaaaaatgaaaactgccgatgttccgatcaacggtactgatatggaattaacgcttatcccggatcaagatacacaacaaacaatcatggacacgattgtcaaaacaacgaagcagtatacaaaagcgatggcagacggaaataccgatcagatgaccgaggctggttccgcctggaaagagcagacgaaagaagtggtatccggcatgaagagttccggcacctttttgaaagatcagtataaagagacaagctttgatctggattcatttgcgatttctcaagagaacggccgctggcaagtaactgttacgggtaaagagcttcatgagtctgcttatttcgacgggaatacgaagcctgatatggaagaggctgagccgagctttcattatgtactctcatatgatacaaaacataaaaaatgggtttttgaaaaagctgatccagcctcagattcttctgggacaaatgtaaaaaaaataaaaaacgaccagccgaaaacctatacatccgcatgggcatcttccaaaggaaatacagcttcaggcagcgtgacaaacgagcaagtcacatcgtttatgactgattacctgacaaatcaatcaagcgccgtcagccttaacaattttgccatcatggcgggcaatttagaagagggaagccctttgtatgctgatcagcagaaactggtcaaaaaactgtacagcgaggggacgactgaagtatttaataaagtgaatgtcaaaagcttttcacagaaaggctctcatctgacgattcatacgtacgaggagttttatattacgaaagccggcggcagtccgaagctcagaacatacaattggacgtatggcggcgttgtcaaagacggaagaatttatttaacatccattcaataaaaaaacccccgcgccaatcaggcggcgggggtttccgtttttaaaagaagaaataattcatgagttctttcatataatgcttgatcgtgaattgaaacgttacgcaaatgatcaaatagatgacgataacagaataaatgatatccgccttagcagtgagctgatgctgatagctcgccagcatgagcggaggcacggcaaacgccgctcctaaaagaccgacagccagaatggtaaagcaaacggttgtatgaagcagcataaaaatgagggcaagaagcaaaatagctgtaaacggaatcaaaaatgctccgaatctggacagcgaatctttaaatgacacctgcgcgccgccggccttcaaagcgataaaaatcaagagatacaggcagaaaacgcataatgcaaaggtaagcgccggtttgatcacaaccgcggtaaaactgacgtcacgaaagccgtctgataagagaatataaaacataatcggcgtcaccaggcagaaaagcaccatgttgatgatgctgctgacaagctgttcgccgcctgtcgttttacatgtttgatacggtctctttaacacatcaagcacgaataaggcaaattgctttgaagcctgcttagccgcggcgccggcctgagcggcctgaccctgtgtttggcctgcgcctccctgcccgggctggggcgcaccgcatttttcacaaaattttccgccatcagtatgatggccgcattgagaacaatacattctaaaactccttttacaagtaatatagggattttgttcaatatttacattataaaagaaaataggacggatgtaacggagttttctaaagatatataaatcaccttctctatgaattgataatagagaaaaagtacccattatggtagaattttattggagctgatagatatcatgtctctcggcgcattgattcagagtgaaaaaggaaattaacgcatgctaaaaaaattgaaaatgctttatcggctgttgaaattcggaaaaggcttatggagatagcaaacagaaaaaaaccgtccttacaaggacggtttttttctgttttccggatcgtccggctgaggttataaaaagcagaccccggggtaaaaatcatgcataagaaacagcggagaacaaaacataactcaataacggcaagtcataaggaggtacgcatgttttcattcatcattcatgtcttcatttcactgtttgcagtctccaatcccatcggaaacgtgccgatttttctttcactgacggaaggatacccggagaaagaacggacagcgatcgcacgcaaggcttccgtgctgtcgtttatcatcttggctgcttttttaattttcggccatctgatctttaaactgttcgacattaacattcatgccttgcgtatcgcgggcggcatttttattttcggcatcgcttataatcttctgaacgcgaagaaatctcatgtacagtctctccatcatgaagagaaaggggagagcaaggagaaagccgatatatccgtgacgcctttgtcgattccgattatcgccggacccggtacgatcgcgacggtgatgagtctgtcggccggccatggcggcatcatccattacatcagcgtgcttatcggcattgcggccgtcatcgcgatgacgttcatcttctttcactattcttctttcatcagcaataagctcgggaaaaccgaaatgaacgtcattacccgactgatggggctgattttggcggtggtggcgatcggcatgatcggcgccggtctgaaaggcatgttcccgatattggtttcctgacttaaaaaagcagcgcccggttatcttcgggggctgcttttttctattttcggcacatgctgaaacacttcttcactctcaaaaaattctatcaaacggctcagccagtcataataatggagccaatccgtcagttcatccaaaagctgacgggctttttcttcaatatcgggactgagattttccgattccagaagctcagtcagctcgcggttcagctttttatagagcattttgtttttgctgaccgcctttgtccaatttgccgtaaacagggagataaacgtctggtaataatcacgctccacgtcgtaaaggtctttgcgaacgcctttttcaaacactttttccgccagattggcatcagtcatttcacggaccacctggctcatcctcgttttgctcatcccggttgcctctgacagctcatttaacgtcatcggcttgcggttcatataaataataccgagcacacgaccaagtgtggccggcattccgaatgtatgcatattctcggcgattctctcaatgagatgctcttcagcatgcccgatgatatcaagagcgtttttttccacggctgatcatcccttcactggcttttcatgctgacaatatatcatattttttacagttgatgaaaaagatgatgcggcaggatatgcgagctatcgggagcgattgtaagaacatccgcattgtcagcgggataacatgaaaaaatacgtatattgtatataatttcaacacattgtaaactttttattttacaaatttcatcttataataaagattatacttttcagaaaaataacggaacccttcggaggtgcacggattgctgagattagaaaatgtatcgaaagtctataaaggcggaaaaaaagctgtcaacagcattgatttaaatatcgaaaaaggcgagtttatttgttttatcgggccgagcggctgcggaaaaacgacgacgatgaaaatgattaacagactgattgagccgtcatccggaaagatttttatcgatggcgaaaacattatggagcaggacccggtggagctgagacggaaaatcggctacgtcattcagcagatcggacttttccctcatatgaccattcagcagaacatttctctcgtgccgaaactgctgaaatggccggaacaaaagcggaaggaacgggcgcgggagcttttgaagctcgtcgatatgggcccggaatatttagaccgctatcctcacgagctgagcgggggacagcagcagagaatcggcgtgctgcgcgcccttgcggcggaaccgcctcttattcttatggatgaaccgttcggagcgcttgacccgattacacgggattcccttcaggaagaattcaaaaaactgcaaagaacattgaataaaacgattgtgtttgtaacccacgatatggatgaagcgattaagctggctgaccggatcgtcattttaaaagcgggagagatcgttcaggccggcactcctgatgacattctccggaatccggctaatgagtttgtcgaagaatttatcggcaaagaacggttattgcaatcaagaccggacattgagcgcgtcgagcagatgatgaacaaaaagcctgtcaccgttacggcggacaaaacactttcgcaggcgatccaagtgatgcgggagcaccgtgtcgattccctgcttgtcgttgatgacctgaatgtgctgcaagggtatgtcgatgtcgagatcattgatcagaaccggaaaaaagcgagcctcgtcggcgacgtgctccgctctgatctgtatacggtcgagcagggtacactgctgcgtgataccgtacgcaaaattttaaagcgcggaatgaaatatgtacccgtcgttgatgaacaaaggcatttagtcggaattgtcacgcgggcgagccttgtcgacatcgtttacgattcaatctggggcgaggaagaccagctggtgacaggctgacaaggggaggaacgcttacaatgaatgaaatgatcaagtttttgcagacgaacggcggagaactgttatataaaacgtgggagcatttatacatttcgatcatcgccgtcatattaggcattgtcgtcgccgttccgctcggagtggcgctgacgagaatgaaaaagggcgcaggcgccgtcatcggcgccgtcaacattgtgcagaccttgccgagtctcgcgatactggcgttttttatcccgctgttaggcgtgggaaaggtgcccgcgatcgtcgcgctgtttttctattcggtgctgccgattctccgaaacacgtataccggcattcaaggcgtaaacaaaaatctgctggaatcgggaaaaggcatcgggatgacggtctgggagcagatcaggcttgtggaactgccgcttgcggttccggtgattatggcgggcatccgcacatccaccatttatctgatcggctgggcgacgcttgcttcctttatcgggggcggcgggctcggagactatatttttatcggcctgaatctctatcagcctgaatatattatcggcggcgccgtgcccgtcaccattttagccattatcattgattatctgctggcggcgacggaacggaaggtgacgccgaaagggctgaaaggactgaaggaagtatcataaggagttggctgttttgaaaagaaaccaaaagagatggatgtgcgcactggcgctgtcagctgctctgcttctgggcggctgttcccttcccggcctgagcggggcttccgatgatacgattaaaatcggggcgcaaagcatgacggaatcagaaattatcgccaatatgctcgcacagatgattgagcacaatacagacttgaatacggcattaattaaaaacctcggatcgaactatgtccagcagcaggcgatgctcggcggtgaaatcgatatcgccgcgacgcgctactcgggaacggatttaacgagcaccctcggcatggaagcggaaaaagacccgaaaaaagcattatctatcgtccagaaggaatttgagaaacgcttccattacaaatggtttgattcttacggatttgagaacacatacgcttttaccgtcacgaaagagcttgcggaaaaagatcatttagacaaagtatccgatattaagaagcatgcggatcaatttaagctcggtgtagacaatgcgtggctgaaaagaaaaggcgacggctataagggcttcaccgacacgtacggttttgaattcggcacaacctatccgatgcagatcggacttgtatacgatgccgtgaaaaacgggaaaatggacgccgtcctcgcttattcaacggacggacggattaaagcgtacgatctgaaaattttaaaagacgacaagcagtttttcccgccgtatgactgttcgccggtcattcccgacagcgtgctgaagcagcatcctgaactgaagggcattgtgaataaactgatcggcaaaatcgatacggaaacgatgcaggaattgaattacgaggtggacggcaagctgaaagaaccgtccgtcgtcgctaaagaatttttggagaaacatcattattttgaataagaaatgaggtggggcaaatggaagtgctgcagcagctcggcacttattattctcaaaacggggcctatgtgcttcaggagttttaccgccattttctcatgtcggtatacggcgttttatttgcggcgatcgtaggtgtcccgctcggcatcttcattgccaggtacagaacattaagcggctgggtattcgcggtgacaaacgtgattcagaccgtgccggcgcttgcgatgcttgcggtgctgatgctcgtcatggggctcggcgccaatacggtgattttgtcgctgtttttatattcgcttcttccgatcatccggaatacgtacacaggaatcgccagcattgaacacgcttatcttgaatcgggaaaagcgatgggcatgaccaaatttcaggtgctccgcatggtggaactgccgcttgcgctttccgtcatcatggcggggctgcggacggcccttgtcatcgcgatcggcattacggcaatcggaacgtttgtcggcgcgggcggactcggtgacatcattgtcaggggctcaaacgccacgaacggaacagcgattattttagccggcgccattccgacagcgctgatggccgttatcgcagatcttgtgatggcatggctggagcgggcgctgagtccggtgagaaagaaaaaacgaaccaaagcgccgaatgcggcatgaaaaaaacgccttgcgggtcagggcgttttttttcttatggcttcggaacatgcttgaatatttcttcgctttcaaaaaactcgatcagacggctgatccagttgtagtaatcaagccaatcctttaattctttcagcagttcgttgattttttcctcagcttcttccggcacgccgttttcaaggacggccgtcagttcgcggttcagttttttatgcatcattttatttttgctgacgaccttgctccatgtggccgtaaacagcgtaataaaggtttggtagtaatcctgctcgacgtcgtataaatctttgcggacgcctttttcaaacactttttccgccagattgacgtcaagcatttcacggaccgcctggctcattctcgttttgctcatgccggtcgcttctgataattcagttaaggtcatcggcttgcggttcatataaataatgcctaaaatgcgccccaccgtcgcgggcattccgaatgtatgcatattttcagcgattcgttctatcaaatgatcttcagcttgttcgattacgtgtaacggatctttctccaacagtttcaatcctttcagtcagcaattccgatgtcaatataccacatttttaaaccggcggaaatgctcttccgagagaatttggcagtaattcggagcaataagaagaactttgccggtcaatacgggtaaatcagtgcttacacaacctttatatataatatggacaaattgtaaactttttaatttacaaagtttaatttataatgggaaacgttcaattgtctgaaaagttaaatttgaatttaacgatttgaacaaatttaatatcggaggtgtgagtgtttgctgacattagaaaatgtctcgaaaacgtataaaggcgggaaaaaagccgtcaacagcatcaacctgaatatcgacaaaggcgaatttatttgttttatcggaccgagcggctgcggcaaaacgacgacgatgaaaatgatcaaccgcttaattgaaccgacagaaggcagaatcctgatagagggccgaaacattatggaacaagacccggtggaactcagaagaagcatcggctatgtcatccagcagatcgggctgtttccgcatatgaccattcagcagaacattacgctcgttccgaagcttttaaagcattctgccgaaaaacggaaggaacgggcgcgggagcttttaaagctcgttgatatggggcctgaatatttagaccgttaccctcatgaactgagcggaggacagcagcagcgaataggtgtattacgggcacttgccgcagagccgccgcttatcttaatggatgaaccgttcggggcgcttgacccgattacgagagattcccttcaggaagaatttaaaaaactgcaaaaaaccttacataaaaccatcgtatttgttacccatgatatggacgaagccatcaagcttgcagacagaatcgtcattctgaaagcgggagaaatcgtccaggccggaacgcctgatgagattctcagatttccggcgaatgaatttgttgaggagtttatcggcaaggaacggctgattcaatcatccagccctgatattgaacgggtggagcagatcatgaatcccgatcccgtgacggtaacacctgagaaaacactgtcagccgccattcagctgatgcgtgccgagcgggtggattcgctgctcgtcattgatgaaaagaacgttctccaaggttatgtcgatgtggagatgattgaccgcaaacgaagacaagcggtaaccgtcgcggaagtgcttgaacgggatctgtacacggtcagaagcggcactctgcttcgcgacgccgtccataaaattttaaaaagaggcgtgaaatttgtgccggtccttgatgaggacggccggctaacgggaatcgtgacaagggcaagcctcgttgacatcgtctatgactccatctggggagaagagaatcagctcgcggtgatgtcatgaggaggcttcaattgatatgaatcagaccgtacaatttttacaggcaaatggaggagagatgctttataaaacatgggagcatctgtacatctcattaatcgccgtcatggcgggcattctcgccgccgttccgctcggcgtcctgctgacgaggatgaaaagaggagccggcgccgtcatcggcatcgtcaacatcattcaaaccttgccgagccttgccattcttgcgttttttattccgcttttaggcgtaggaaaggtcccggccgttgcggcgctgtttttctattccatgctgccgattctcagaaacacgtatacggggattctcggcgtcaatcggcaccttctggaatcgggaaaaggaatcggcatgacggcatgggagcagatcaggcttgtagagctcccgcttgccgccccggtcatcatggcgggcatcaggacgtcttcgatttatttaatcggctgggcgacgctcgcctcctttatcggcggaggcgggctgggagattacatttttatcggcttgaacctttatcagccggagtatattatcgcaggcgccgttccggtcacgatgctggcggccgccgtcgattacatgctggggtgacagaacggaaagtcacgcctgacgggctgaaaagcataaaggacgctttataaggaggaggtctcacatggggaatagatgcaaaaaacggctgctcgcaatcgcctgtctcggcatgctgctccttggcggatgctcgctcccgggattgagcgccgcatcggaggacaccattaaaatcggcgcgcaaagcatgaccgaatcggaaatcatcgcaagcatgctcggacagatgatcgaacatcacagcgggttgaaaacatccgttattaaaaatctcggctccaacgccgtacagcagcaatccttgatcaacggtgatattgatatcgccgcgacgcgctatacaggagacgcgctgaccgggacgcttcgcatggagccggaaaaagacccggacaaagcgctgcggctcgttcagcgtgaatttcaaaacagatatgacatgaaatggtttgattcttacggctttgataatacatacgtctttaccgtttccggacagcttgccagcaagtaccatttagaaacggtatccgatgtcaaaaaagaagcatcccatctgaaattcggcgtagataactattggatgaagctgagaggcaacggatatcaggattttatgaaaacatacggaatgtcatttgaaggcacgtatccaatgcagatcggcctcgtatacgacgcgctgaaaagcagaaagatggatatcgcgctcgcttattccaccgacggaagaatcatcgcttacggactgaaaacgctgaaggatgataagcggttctttcctccgtatgactgttcacccgtcgttccggatcatgtattaaaagagcatcccgaactggagggcgtgatcaataaaatgatcggcgcgattgatacaaagatgatgcagaaaatgaattacgaagttgacggccgattaaaagagccgtccgtcgtggccaaggaatatttagaaaaacatcattactttgaataacggaaaggagatgtgcggatggacacgatgaaagagttgtttacgtattacgctcaaaacggcagctatgttctgtatgagtgctggcggcactttctcatgtcggcgtacggcgtcgttttcgccgccgttttcgccattccggccggaattgtgacagccaggcacgggcgtctcgccggctgggtgtttgctgtggcgaacgtgattcaaaccgttccggcgcttgcgatgctcgccgtcctgatgcttgtcatggggctcggcgccaatacggtcatcacggctttgtttttgtattcactgctgccgattctcagaaatacgcacacgggcattatcaatatcgagcacgcttatctcgagtcgggaaaagcgatgggcatgacgaaataccaaatccttcgtatggtggagctgccgcttgcgctttccgtcattatggcgggtctccgaacggcgctcgtcattgccatcggcatcacagcgatcggcactttcgtcggcgcaggcggtctcggggatatgatcgtcagaggctcgaacgcgacaaacggaaccgccattattctggcgggcgccattccgaccgcgctgatggcggtggccgcagacctgctgatggcgtggctggaacgagccctcagccctgtgaaaaaacaaaaaagaaagctgatcgtacgctcagcctcatgaaaaaaagcattcttccgcgtgaaggatgctttttttgatttcttgattaaattttgataactgcgctgtaaagtcttacatatcaaataacaaagcagaggggtaatcatatgagcaacatcatagaaacgagacagctgcaaaaatcattcggcagacaacaggcagtggctgatgtgtctctatcggttaagcgcaacagtatatacggcctgctcggtccgaacggcgcgggaaaatcgacgactctcaaaatattgaccggcatgctgcagcaaacatccggcgaggttctgttcgagggacatacatggaagcgcgaagatttgaaaagcatcggttccctgattgaagcaccgccgctttacagcaacctgacagccgctgaaaatctgaaagtccgctgcgtgatgctcggactgcctgattcaagaattgcggaggtgctggaaattacgggattaacgggaaccggaaaaaagcgcgccggacaattttccatgggaatgaaacagcgtctcggcatcgcgttggcattattaaaccgtccgtcgctcttaattcttgacgagccgacaaacggattggacccgatggggattcaggatttgcgggaatttatccgctccctgcccggacagggaatgacggtgattttatcaagccacctgttatcagaagtggagcagatcgcagaccatatcggaatcatcagtgacggcgttttaggatatcagggagaaatcagccgggaagacgatctggagcggctgtttctggaggttgtcaaatcaacacgggagaaagcgggacaggaaaatgattcagtacatgcaggcggaacaccttacatctaaaagaacatttatcagaaagctgatcattctgattccgcttctgaacgcggctttttcttttctgctgaatgcggcctattttatgacgggcacgttcaattggtgggcggttattttcatgccgctcatgattgctctaatgtgcggtttatctgttaaaaaagagaaaaaatcagcgaatgaccgcgcggtgtactcattgccggcagatttaaaaagcatatggttctcaaaaataagtttgatcgcgctgtattcactcctgtcgcaaatcgtctttttagtcatcgtgtttttgcttggccttgtgtttccggcaattgctgcgctgcagctgaaaggcgttgaagcaagctcccttttgtggctgacgacgctttgggaaatcccattgtgcttatggattgccagacagttcggatttacggcagtcattctcatcaatatgatcgccgcctttgttttaggcattgtgccggcgtccggttcattgtggtggctgagtccgtggagctggtcagtccggctgatgtcaccgattctcggaatccacccgaacggaattccgcttcccgcaaacagcggcttattaaacggaaacgtgatcattccggctattattctttctattctttcttttatcgcaataagttttgtttccgcagtgtcattttcaaaaggaggaaaccggtcatgaccgtgcttttacgatatatgtgggccgatgtattaaaaatgaagcgcacgccgctcatatggatgcatgctgcggcgccggttttatgcgcgggatttttcctgttatatatgtatggaagggttcaggagtcttatatgctgtacagcgtctttttcagcgcgattgccgttttataccctctgatcatcagtattgtctgcggcatgtctgcctctgtcgaggaacaggcgggccattttcagatgatgctggcggttccgtattctaaaatcgtcagttttgcgggcaagctgcttctgctgctcctattgaatgtgttatcggttggtctcgccatctgtctttatttggcggggttgaaatttgttcttcacatcaatgatctcccgtatcttctctttttaaaaggaggggcgtggctgattgccggcagtattccgctttatatgatgtctttttttgtcggcataaagtacggcatgggaccgtccgggcttttagggggtgcgggattattaatggcggcgctcatgaatacgggacttggcgatatcatctggcgtttttttccgtgggcatggagcgtgaggctttcaggccttgcaggactgctgcattttgacaaagtcaaaaaagagttcctcccttatgtaagatacgatatgagattcggagaaataatgttatatttttctatagtgatattatgtctggccggcctctattggtgcagaagatgggaagggcggcgttcatatgaataaaggcaaggagcgattcggccggtggcaaacattttagcaattgatgatgaaaaagatattctcgttctgatcagaaacattttacagcgtgatcagcatacagtaacgattctggaaaaagcggaagatcagtcattggatttttttcaaggctatgatttgattcttcttgatgtcatgatgcccggaacggacgggattgaactctgccggcggattcggccgctggtggacagcccgatcctgtttttaacggcaaagtctgacgaagaatccattgtgaaaggcctcatgacaggcgctgatgattacatcacaaagccgttcggcgtacaggaattgatggcaagggtaaacgcgcatgtcagaagggaacggcgggaaaagcatcagacgaaacggctgatatcaggcttcatgtttgattttgacaataaagaagtatggatggatgaccggaaactgcctcttacgaaaaacgaatataaaatcgttgaatttctggcacagcataaaaacagaacattctcacgggagcagatttacgaggaagtgtacggcttggacggcgatgcgctctattcaaccattacggagtttatcagaaccatccggaaaaaatgtaaagaacacggggctgatccgatcaaaacggtgtggggtgtcggatacaaatgggaatagcaaaaggaaaatccagcatccgcaaagagcttgtcaaatttaccatcactttgtgtctgagcacgatgggggtggcggcattatgcgtcgccttaaatgccattgccatgaatgccggagcgatcctgcccgcaaactacagcgagcatgaggcggaacagatcaaaccccgcctgaaatcagcggaaaagataacagaagacatgatccccgcaggtatgacatacgccgtttttgataaaaaaacaaagcggatgacaaaaggaacgatgacggaacaagatgcggccaacgccagaaaaaagattcagcatacgccgtattttaattatgctcaaaaaggattcatggtgataaatcggaaagatgaatacggcgttctccaatattcactcaggtcggaatttcagtcgccgctgttaaggcgctatctgccgaattatgaatggacgggtcttacgattctgatcactttgcttcttttgactgtttttatcgtgacgacgcgtttcgccaatcagctgagacggcatttcagcacactcagctccattacggcaagcattcaaaaacagaatttaaatatcaatccaaaaaggtcgcgtataaaagaatttgacgatgtcattgactctctgctgaaaatgaaagacgcgcttcaggcatctctggcggcgcagtgggaggcggagcggataaagaaagaacagatcggcgcgcttgcgcatgatattaaaattccggcaacgatcattaaaggaaatgccgagctgctccagttaacagaacctgatgaggagcaggcggaatatgcgcagtatatcctggatgccggaaacaaaatcgagcattatgtcggacagctgatccagctttccaaagcagaggaggcagttgccgttcatgtcgaatataccgacctcaaagagtggattcaaaacatatatcgtgacgcggcggcgcttgcggggccgaagcagatggatctcgtcctcagcgaacggggaattgaccgaatagaagcgccgatcgatcatgagctgctccacagggcggtcatgaatatcgcggcaaatgccgtcgactatacgccggaaggaggggaaatccgtgtggacgtcctgtgcaccgattccgccctccatcttgccgtatccgacagcggaagcgggttctcgccggaggcgctgaaaagagcgacacagcttttttacacggaggataaaagcagacattcggcggggcatcacggcatggggcttacattcgcccatcacgtcgtacatcttcatcacggcgaattaatacttgaaaatcaggagtctggaggagcccgggcggagattcgaattccgctggaaggcgtcagacaaaaacaagccctgcacgcctgagggcttgtttttctgtataagaaaagcaaaaataaaaacggctgtccgtttgagagatcagccgcttatgcggaaaagagtttatcaggaaggatcaatccatgttgaagaccacttggaaatttcctctaaaataggggctaatgcgcagcctttttccgttaaagaatactcaatgcggacaggcgtttcggggataacatcccgtttgatgacaccttctgtttcaagttctttcagacgttctgacaagactcttccgcttaaattcggaagcgccgcttcaatttcgctaaatcgctgctgtccgttcaataactgaaagacgattagagccacccagcgtttacttaggatgtcgaccgctttttcgaatctggggcacatttctgattggttcatgctttttcacctcgtcttctgctattataccgcaaaatcggagggaacgtacgtctggcgcttgttaagttgaggagaggatcaaaaagaggatgaggaatccggggagcgttttttcgcttcagccgcaataaaatcaaagtatttgctgacgctttcaatatcttcttttgtgaagtgctgccactttttgctgtcaaacagcggcagatgctccgcgcctctgtcaacggcggtctgatagatggcgcagatggattgatagctttcggaggtttcacggatttcctcctgaaatgccttgatgtgtccggcccgcgccattaactcctcgtacgggatttttaatgtgtccgccaattttctgatggtcgcgggtttaggaatgccgcggtgcccgttttcaattctggaaatggtcgccgagctgacgccggaatagacggcaagctgattgacggtaagcttccgggcgcggcgcagctctcttaattgctttccgaatgtgttcaataagatcgcctcacatgtgcaaagtcatgagtcttcatttgttctttttttggcttccgccgataagaacgcaaagtatttatcaagcagaaccaagtcttctttcgacaggtgccgccagttctcccgctccaaaagggataaatcatgcagctcatacgtttcggctttttccagcaaggtgcagcccgtgtcgtacggggctctcgtttcctggacggtctctatgtatcccgccgtctgcatcagttcctcatacgggatttttaacgcatctgcgagctttttaatggttgcaggtttcggcactccgcgtttgccgttttcaatccgcgagattcccgcggcgctgacgcctgaatacgttgccagctgattcactgtcagatgccttttttcccgtaatgtccgcaattgtttcccgaagctttccacagtctctccccctcccgcggtctatttatattctagtatgtttattgactaaagggaatagccaggctggaaaagtattgacaaaagttaacaaaagccgtatcttatgtataagaaagaaagtatttgacagaacggaaggtgaagaaagtggtcgaaaagatacagatcagaagagattatgtgctgcagtatatggtcaataatgactactcgttaaaccagctcgccctggagatcggaatatctcccgccacactgagccgtgtactgaatggagagcgaaggccgggccagctggtcatcggaaaaatgctctattactttgacatgaaatttgaagatcttttttactacgactttgttgacaaaagtcaatgaagatggaagattcaaacgcatttccgtttttctgacatgatgtacaccgatacggcgtgacatgcctttgtttttcatgtaaaatagaagcaatgtaggccagtcagtctggaggtgtatgggatgcacacattattgattaccttattggttatcgtcagtattgcacttattattgtcgtattgcttcaaaccagcaaaagcgccggtttatcgggtgcaatttcaggcggggcggagcagcttttcggaaaacagaaagcaaggggccttgatctgattcttcaccgcacaaccgttgtgctggcagtcttgtttttcgtgttgacgatttcgctagcgtatatcgtataaggcaatgtttgtataaggtctgatttaatatcaggcctttttcttgttgagagacggcgtttgtttctcgcaaaactgtggaaaactaaattgaatgtgcaaaaaaggggttatgagcatgaaaattgtgacaccaaaaccatttacatttaaaggcggagacaaagcggtgcttctgctgcacggatttacgggaaatacggcagacgtcagaatgctcggccgctacttgaatgagcgcggctacacttgtcacgcgcctcaatataaagggcacggcgttccgccggaagagctggtacatacgggacctgaagattggtggaaagacgtcatggacggttatgagtatttacggtctgaaggctatgaaaacattgcggcgtgcggactgtcgcttggcggggttttttcattgaaattgggttacactgtacccataaagggaattgttcctatgtgtgcgccgatgcacattaaaagtgaagaggttatgtacgaaggagttctctcctacgcgcgcaattataaaaaattcgaaggaaaacagccggagcagattgaaaaggaaatgaaggagtttgaaaaaacgccgatgaatacgctcaaatcgctccaggagctgattgccgatgtgcgcaaaaacgtcgacatgatctattccccgacatttgtggttcaggcacggcatgaccatatgattaatacagaaagtgcgaacatcattttcaacgaggtggaaacggacgacaaacagctgaaatggtatgaagaatcaggccatgtcattacactcgataaagaacgggacctcgttcatcaggatgtgtacgaatttttagagaaactcgattggtaacaaacaggaggtcgaataatggaaaaagaagcgtttatggaccgtcttctcgcgtttatgaaggaagaggcgtacaagccccttaccattcaggaactcgaggagatgctgaacatcacggaagccgatgaatttaaagagctggtaaaagcgctggtggcgctcgaggagacgggacagatcgtccgcaccagaagcaaccgctacgggcttccggaaaaaatgaatttagtaaaaggaaaaatttccgcgcatgcgaagggcttcgcgtttctgctgccggaggatacctctttaagcgacgtgtttattccgccgaacgagctgaatacggccatgaacggcgatattgtcatggtgcggctcaattcccagtcaagcggatcgagacaggaaggcacggtcatccgcatcctggaaagaagcatcgaccgcgtcgtgggcacatacacagaaacgaaaagcttcggctttgtcatcccggatgataagaaaatcacgagtgatatttttattccgaaacatgccaataacggcgctgcggaaggccataaagtcgtcgtcaaactgacaagctatcctgaaggcagaatgaacgccgaaggggaaatcgttgaaatactcggccataaaaatgatccgggcatcgatattttatccatcatccataagcacggcctgccgggagattttccggctgaagcgatggagcaggcaacaagcacgcccgataccatcgatgaaaaagacatcaaagaccgccgtgatctccgcgatcaggtcattgtcaccattgacggcgccgatgcgaaggatctggatgacgccgtcaccgtgacaaagcttgataacggcagctacaagctcggcgttcatattgccgacgtcagccattacgttacggagaattccccgattgacaaagaagcgctggaaagagggacaagcgtgtacttggttgaccgggtcattccgatgatcccgcacagactgtctaacggaatctgttctttaaatccgaaggtcgaccggctgacgctttcctgcgaaatgacaatcaaccagcagggacaggtgacggagcacgagatcttccaaagcgtcatcaaaacgacggaaagaatgacctattcagatgtcaaccggatccttacagaagacgacgccgagctgaaagaaagatatgagccgctcgtcccgatgtttaaagacatggaacgtctggcggaaattctccgggcgaaacggatggaccgcggcgccgtggattttgatttcaaagaggcgaaggtgctcgtcgatgaggaaggcgccgtaaaagacgtcgtcatcagagagcgctcagtagcggaaaagctgatcgaagaattcatgcttgtcgcaaacgaaacggtggccgagcacttccattggatgaacgtgccgtttatttaccggattcacgaagagccgaacgccgaaaaactgcaaaagttcttggagttcgtcacgacattcggttatatcgtcaaggggaaagccggagacattcatccgcgcgcgctgcaaagcattcttgatgaagtgcgggaccgtccggaagaaacggtgatttcaacggtcatgctccgttccatgaagcaggcgaaatacgacccgcaaagcctgggccatttcgggctggcgactgaattttatacgcacttcacatcgccgatccgccgatatcctgacttaatcgttcacaggctgatcagaacgtatttgatcaacggacaatcggacgaagcaactcaggaaaagtgggccgaacgccttccggaaatcgctgaccatacgtcaacgatggaacggcgcgccgttgatgccgagcgggaaacggacgatctgaaaaaagcggaatatatgcttgataaaatcggcgaggaatttgacggcatgatcagttccgtcacgaatttcggaatgttcgtcgagctgccgaatacgattgaagggcttgtgcacgtcagctttatgacggatgattattaccgttttgacgagcagcatttcgccatgatcggtgaacgcacgggcaacgtttaccgcatcggagacgaaatcacggtcaaagtcgtcgacgtcaataaagatgagagaaacatcgactttgaaattgtcggcatgaaaggcacccgccgtccgagagaaacaacaggcgaccgcagaaaacgaggcagaccggcgcggaaacgcgtgttaaacagcaataccccggcttcaccgccgaaatcggaggaaaaaggggaatggtttacaaaaccgaagaagaaaaagaaaaaacgcggcttccaaaacgcgccgaaacaaaaacgcaaaaagaagaagtaaatgcgaaaagcaaatagggcataatgctctgtttgctttctttcgcaagccgcattttcattgtcgcggaacgctccatttgctaaaataaagcgtatcgcacacatgaacggtttttgcggagagaggaggataaggcatgccaaaaggatcaggcaaagtattatcgcaaaacaaaaaagcaaaccatgattactttatagaagaaacctatgaaacaggcatcgtgctgcagggaacggagattaagtccatccgcgccggccgcgtaaacatgaaggattcctttgcgaaaatcgagcgcggcgaagtgttcctccacaacatgcacatcagcccgtacgagcagggaaaccgctataaccacgacccgctccggacgagaaagcttttgatgcaccggaaagaaatcaataagctgatcggcctgacgaaagagaaaggctattccctcgtgccgctgaagctgtacttgaaaaacggcttcgccaaagtattaatcggcctcggaaaagggaagaaaacatacgataaacgtgaagatttaaaacgaaaagacgccaaaagagaaatcgaaagagcgttcagagacagacaaaaaggcttctgatgcctgagccttgatgtgatgatatgccctgtgctatactgttcacacatcagattcacaggctgtttattgaagatattcccaattgaatttgcctgtgatcatggtataataacagtacagccagttgagcaagagcttgatagatctcccgtatacccttaacaaggggacgttacggattcgacagggatggatcgagcttgagctgcgagccgagaggcgatctcgttaacacgcacctaaatataactggcaaaactaaaagttttaaccaaaacttagcactagctgcctaataaacgcagcgagctcttcctgacattgcctatgtgtccgtgaagagcacatccaagtaggctacgcttgcgttcccgtctgagaacgtaagaagagactgacagactagctctcggaaggcccgcccgcaggcatgaagacgagtgaaacacgaaatatgcaggctacgctcgtagacgcttaagtaatcgatgtttctggacgtgggttcgactcccaccgtctccatacataacagaggaaccgcagtgccgtcacatgacgcactgcggtttttttatgccgacaaaaaggagtgaatgtaaatggaaatcgtcatcatagacggaaaagatgttacaagcacagaagctttacaccgaatcttaaaagatcaattagatttcccggacttttatggtgaaaatctgaacgccttatgggattgtctgacaggctggatcgaacttccgctgactttggtgtggaagaattttgagatcagtcagaaggaattgggttcggatgctgatgatgtcttggagctgtttcaagaggctcaggcagaattagatggtgaatttttcattcaaattgatcagccgtcagccgggacaacggacaggcactaaaaagtgcgtacttcccctcatccatttttctatccgataatagggacggaaggtttcaggctttcgatttctgtccatatataagaagagacttgcgatagggaggaatggatgatggacttgcagttgaaagggaagacggcgcttgtgacgggatctacgtcaggcatcgggaaggcgattgcggcttcgctgattgcagaaggtgcggccgtgatcattaacggccgccgtgaagaaaaggtgaacgaaacgatccgggaactagagaaacagacgccggatgcccgtctctatccggccgcgtttgatttaggcacggcggaaggatgcggcgcgatttttcagcagtatcctgatgtggatattctcgtcaacaatttaggaatctttgaacctgcggaatactttgatattcctgacgaagagtggctccggtttttcgaggtgaatatcatgagcggcgtgcggctgacacgccggtatgcaaagcggatgattgagcggaaggaaggacgggtgatctttatcgcgagtgaagcggccgtcatgccttctcaggaaatggctcattacagcgctacgaaaacaacgcagctgtcgctgtcacgcagcctggccgagctcacggaagggacgaatgtgacggtgaatacggtcatgcccggctccacgaaaacagagggcgtcgaaacaatgcttgagtcgctttatcccggtgaaaacttgacagcggctgaagcggagagacgatttatgaaggaaaatcgtccgacgtccatcattcagcggttgatccgtccggaagagatcgcccactttgtcgcctttttaagcagcccgctgtcgtctgccattaacggatctgcattgcggatcgacggcggcttggtgcggagcattatataagatgaacataaaaaacccccgcaaagtggcgggggtttttttaatgcggatcacgctgaaaccggctgatgatcctgctgattaaatcttttgttgcacagtcaaagtgctcttctttttggtttgtcaaaagcccgacaggcggtgaaattgttaagttatggatcggaatgaccttcgtgccctcgatcggctctgaatgcgccgtcgccgtaaagattgagacgccgatattttccctgacatagtattgatgagccatgctgctggtcagctccatttttcgatagcggctcccgatggcccgctgcaggtgctgttcaatttgaatccggatcgggcaattggcgggcgtaaaaatcaggcattcattttctaaatcttcgagattaacgcttgctttggcggcaaggggatgtctgtctgacacgatgacattgagcgagtcatggaaaaacggatcgaaataattttccagaatcagctccggctcgccgcataccgcaaaatcaatagcgccctccagcagtttgcggctgcatgtattggcatcatccacgctgacattgaccgacatgtccggataatcatttaagaaaccccgcagcacggcagggaagatcaggcttgccgtcggttcggatatgccgatctgaataaggccggcctggccctgtctgatatcggccagagtatggtcaagcacctcgtattgcgcgagaagctgcccggcccgctcatgaaacagccgccccgcccttgtcagcttcagcttctttccacgttcaaacagctgcgcgcctacatcctgttccagctgtttaatccgcattgaaatcgtcggctgtgagtagttcagaatttctgcagccttataaaagctgcctgactgtacgatggtatgaaacgttttaatggttcgtagttccaacgaaatcccctcccggctgttcattaattttcttgaacctttcctttactttttttgattagtcaaacaaatcagtttgctttatagtataaacaatcaaagcttagtaaacaaattggaattatatattttttgcggggagagtgaccggaatgagtgaagacatatttcgattggctgagaaaaaggatgcgccggagtttttagagctgctgtacagcgcgtttcagccgatccgcaatttggagattgactggccgtcggcgcgggccgacatcgatatggtaacggaaaatattgaaaatcattcagccgtcgtgctcgaacgggatggacggcttctttcaaccattacgatccgttttccgtgggagagtgacacgcctccgtcaaaatatccgtttgtctggtggtttgcgacgcttcctgagctgaaggggcagggcatcggcagcaaacttttgacttatgtggaggaacatgtgctgcgggatacgctgaaggccccggccatcacgctcggcacttcggcgcgcaagcatccctggcttgtagatatgtacagacggaggggatatgaagtgtattttgagcaggagaaagacggagacatcggagttatgatgagaaaggtgctcataccggagcggtttgacgcgtcgctgttaggcacaccgagctgggcgcaatgatcaaaaaacggatcagagccggctgtctgcttctgctgctcggcgtgctggccgggtgcgggcaaggagaaagcgcaaaagcggggagcggcgtgcagaccgtcatcgtcggcacgggaactgattttccgaacattgcttttatggatgaaaaaggcgagctgaccggctatgacattgaagtgatgaaagccattgatgaacagctgccgcaatacaaatttgtctttaagacgatggatttttcgaatctgcttacaagtctcggaaaccggaaaattgacgtgatcgcgcacaatatggcgaaaaacaaggaacgggagaaacgctttttgtatcacaaaatcccgtataactactcgccgatgtacatcacggtgaaggcggataatgacgcggtacgcacgctccgggatttaaaagggaaaaccgtcatcgtcggcgcgacgtcaaacgcggcggattatatgacggcatacaacaaaacccacggcagcccgatacatttgaaatacgccgggcagggcggcaatgatacagcgaaccaaattgagacaggacgcgctgacgccaccgtatccacgccgtttgccgtcgattttcaaaataagacgcacgcgttcaaacaaaagacggtcggtgatgtgctgctcgataccgaggtgtattttatgttcaataaaaacagccaaaccctggcggacgatacggatcgggcgattcaaaggcttgtgagggacggcacattgaaaaggctgagtgaaaaatggctcggcgcggattattcaaaatcaagtttcacgaaataattgaagcagaaaacggggcgatcacatgaaaataagattggcggtcatgtcattaacaattgcggcaacggcggcgttatcagcctgcggcgcgggaggggaggcggcatcaggcaatcagaaaaacgtgaagaacattacggtcggcacggggactcaattttcgaatatttgctttattgatgataaaggcaaattgacgggctacgacgttgagctggtgaaagagcttgacaggcgcctgccggactatcgatttacctttaaaacgatggatttctccaacctgcttgtcagcctcggccagcataaagtcgatatcgtggctcatcaaatggagaaaagcgccgaacgggagaaaaaatttctgttcaatcaagtcgcgtataacaacttcccgctgaaaatcacggtgctccaagataatggggacattcacggcattaataacttgaaaggaaagcgggtcattacaagtccgacgtcaaacggcgcgcttgtcctgaaaaaatggaatgaaaaacacggcagtccttttgaaatcgcctatgccggccaaggttcaaacgatgcggccaatcagctgaaatccggccgcgccgatgcaacgatttcaacgccgtttgctgtcgattttcaaaacaaaacgagcgcgatcaaagaaaaaacggtcggcggggtgctgtcaaatgccaaagtgttctttatgtttaacaaaaatgaacaaacgctgagcgatgacattgataaagcgctcaaggaaatcattgatgacggcacgcttaaaaagctgagtgaaaagtggctcggcgcggattattcaagggagcaatattaagtgaaaaagagagggaccggcaatggaaaaagcgtttgatatcagtatgatcgcgtcctttgtgccgacattgctcgggtatttgcccgtcacgctgtatatattggcggtgtctttgctgttcggctttctattggggctgcttttggcgctgccccgcatctatcgcattcccgttttgaatcagtttgcgaagctgtatatctcttttttcagaggaacgcctatcatggtgcagctgttcattgtattttacggcattccggcgctcacggcgctcgccggaattgatacctctaaaatggaccctttgtatgcggccatcgccacgtatgcgctgagcagcgcggcaagagcggccgaaatcatcaggggaggtgtgaacagcgtcggccgcgggcaggcggaggcggcgttcagcatcgggctgaacagagggcagacattccggcgcatcattctgccgcaggcgctcgtgcaggcctttcccaacatcgggaatatggtgatcggtttcttaaaagatacatcactcgctttttcgatcggggtgatggatatgtcgggcagaggacagaccttgattacatcgagcaatcattctcttgaagtgtatatctcgctgtctgttctgtattacgcggccgcccttttatttgaatgtgtcttcagatgggccgaaaaacgaatcaagaaagatgagacgcgccttgtgacggtttttgacatgagtgcgcacggctgaaaaggagggagaacagtggagctggacattccgtttatcggcactgcgataaaacaaatgttgaaaaccgttccgcttacattggcgatgacgatcattccgattattgccggatttttcatagctctcggcaatatcacggtgcgtatattccgcatcaaatggctgctggcctgctcagcgttttacgtgtcttttttccgcagcaccccggcgattctccatattatgctgatttatttaggggttccgctgattgccgatcaattcagccgcgcgtttcatctcggctggtcagccaatcagattccggtcgccgtgtttgtcatcatggcactgtcattaacggcaggcgcttatatgacggaaattctccgatccgggatcatggccgtcgatacggggcaggcggaggcggcatattcaatcggtctgacgcggggccagttgattcggcgcgtaattctgccgcaggcgttcatgatatcgctgccgaacttcaccaatataggcatcggctttttgcataccacttccatcgcggcaattgttgcagtgcctgaaattacaggaacggcgacgattgcggcatccgataactatgcgtttctggaagcatttatcggggcggccgtgatttattggggattaacgctgattctcgaagctgtaaacagtctggcggaaaaaagagcggccagatatcaaggaggcgcattatgatcgaaatccgaaacattcagaaatattttggcagtcatcacgtgctaaaggggatcaatttaagtgtccggaaaggagaagtcgtgaccatcatcggcccgagcggttccgggaaaaccacttttctgcgctgccttaatttgcttgagcggccggatgagggcgccatttcgctgcacggtgaagtcattaactgcaaaaagcctgccaaaaaagacattctcagactgaggaaacagacagcgatggtttttcagcaatatcatttgttttcgcataaaacggcgattcaaaatgtcatggaaggcctgacggtcgcaaggaaaatgaaaaaaacagacgcgtacgccattgccgagcgggaactggccaaggtggggcttcaggataaactacacgcctatccgaatcaactgtcgggaggacaaaagcaacgggtcgggattgcccgggcgcttgccattcatcctgatgtgatgctgtttgatgaaccgaccgccgccctcgatccggagcttgtcggcgaggtgcttgaggtgatgcttaacattgtgcggaccggcgctaccatgatcattgtcacacatgagatggaattcgccagaagagtgtccgaccgaattgtgtttatggatgaaggagcaatcgtggaacaaggaacgcctgaggaagtttttcacaagacgaaaaaagaaagaacgaagaagttcctccgccgcgtgctgcctgattacggttatgacataaaagagcgcataaaggagcctgtcgtatgattcgtttaagcattttagatcaaagtgtcaccgcggaaaaccaaaccgcagaagaagccttgcggcaaacggtgaaattggctcaggaggccgaacaatacggatatgaccgtttctgggcggcggagcatcataacaatgaagagatagcgggatcagcgccggaaattgttctggggtatcttgccgcaagcacgaaaaaaatccgtctcgcatcaggcggggtgatgctgcagcattacagtccttataaagtggcggagcagttccgggttctgtccgcccttgctcccggccgtgtggcgctcggtgtcggcaaagcgcccggcggatttcagctgtcaaccgatgcgctgcagcgggagcttatccagcccgcccgtttgtttgaagaaaagcttgaggagctgactcatttcattcgaaatgattttccggactcgcaccgctacgcgtcattgcggccgacgccgcatactgagtatgcgcctgacatctttttgctcggcagcagcgcggaaagcgcgatatccgcggccaaactcggcatttccttcgttttcgcctatttcataaacggtgaagaggctgcgttagaaaaagcgcgccacgcctttgacgagcatctgccgaaaggatcgaaggcggaatttcaccttgcgccgatggtatttaccgcgcatacaaaagcagaagcggaaaaacacgtcgtatcgcgtgagtcggtcaaaatcattctcgaagacggcaaaaaggtgaatgtcggttcccgggaacaagcggaagcgtttctggaacaagtcacgcagccatataagctgatcacacaaaagacgggtgtgattgccgggacaaaagaagagaccgccgccgagctgagacgattatccgttcaatacagcattaccgattttgtgattttgtcgcctatcaaaaacgctgaggaaaaacgattgtcttaccggctgttaagcgaagcggtgcagccggccccacaattataggagggatgaacatgagtcatgaagtaaacgtagtggtctggagcaaacagggctgctcctattgcgatgaagtgaaaggatatttgcgggaaaaagccgttgcatacgaaacaattgatgtgacagaacgggacgaattgcgtgacgtgctgcagacgaagtacggcatccgtcatgtccccgtcgttgaaatcggcagcggtgacagccgtgtgtatcaggccgttactcaagtcggcattgatcatgtagaacgggcgcttgccgattacgaggggaaaaagggggagagaaaatgagccggacggatctaattcaattcggagccatgattcacggtgtcggcggcacaacggacggctggcgtcatcccgacgccgatccgacagcaagcacgaatgcggcgttttacaggcaaaaagcgcagactgctgaaagagggctgttcagctttgcttttattgcggacggcttgttcatttctgaaaagtccatcccgcatttcttaaatcggtttgagccgatcactattttatcggcgcttgccgcctctacaacccatcttggtttaatcggcacattttccacctcgttcactgagccgtttaccatcgcaagacagctgatgtctcttgaccatatcagcggcggccgggcgggctggaatctcgtcacctctccgcaggcgggagccgcgcgcaatcacagcaaagaaagtcttcccgaccacagccggcgctacgacatcgctcaagaacatgtggacgtggtgcgcggtctgtggaattcctgggaagaagatgccttcgtccgcaacaaagaaaccgggcagttttttgatcctgacaaactgcatcgcctatatcataaaggcgagtattttcaagtggagggcccgctgaatatcggccggtccaaacagggagagccggtcgttttccaagcggggtcttcagaaaccggccggtcgtttgccgcgcgtaatgccgatgcagtctttacgcactccaattcacttgaggaaacgaaagctttttatgatgatgtgaagaagcgggcggcggattacggccgcgacgcttccaagctgcggatctttccgggaatcagtccgattatagccggttcacaagaagaagcggaagcgaaatatcaggaattcgccgagctgataccgatagagaacgccattaaatatgtggccagattttttgacgattatgatttgagccgttttccgctggatgagccgtttcctgatttgggcgacgtcgggaaaaacgcgtttcaaagcacgacagaccgtatcaaaagagaggctaaagccaggaatcttacgctgcgtcaagtggcgcgcgaagccgcgtttccgcgaacgaactttatcgggacaccggaacgtgtggcatcattaattgaaacatggtttcagcgggaagcggcggacgggtttatcattcactctgacatcccgggcatgcttgaagcctttgtggatcaagtcataccgatccttcagaaaaaggggctgtaccgaaaaagctatccggcggatacattgcgggggaatctcgggttggatattccgatctgcaaaccaaatccgattttgagcagaaactaaatgtttctgctttttctgctgcttgccattcccgtcattacagccttttttaaaaaatatactgatttcgagatattattgttgcgaaaagaattttttgtaactataattattacagaactgatcagtataaaaaaacattcatatttcataataaatgtgtgtgtaatttgaaaacgaaagggctgtttacaatggcaaaagtactttatatcactgctcatcctcatgatgaaaagacatcttacagcatggcgacaggaaaagcgtttatcgattcttataaagaatcaaacccgaatgatgaggttgtacatatcgacctttacaaagagaacattcctcatatcgacgcggatgtattcagcggctggggaaaacttcaatccggcacaggatttgaagagctttctgaaaacgaaaaagcgaaagtcggccgtctgaacgagctgagcgatcaattcgcgtcagctgacaaatacgtattcgtcacaccgctttggaacttctcattcccgcctgttatgaaagcgtaccttgattctgtggctgtagccggaaaatcattcaaatatacagagcaaggcccgatcggcctgttgactgacaaaaaagcgctccacattcaggcgcgcggaggctattactctgaaggcccggcggctgacatggaaatgggccaccgttacatcggcatcatgatgaacttcttcggcgttccttcttttgacggtttaatcgttgaaggccataatgctgaaccgaataaagcacagcaaattaaagaagatgcgattgcccgcgcgaaagaagccggaaaatcattctgatcttaaaaaaaacctccccgccgtacggctgggaggttttttatattaaagggcaatcgtccgtttttgctcgctgcttttcatcgccgcttcaatgacacggatgacatcgatgccttcttttgccgtaacgggaagctgttttccgtttaagatgctgtccgccagcagtttgtagtacgtaaggtaagagccgttctcagaggggattgtttctgtatgccttttttcatccgctgcgattgtcagctctccgaagttgtcagggtcatcggcgccccagctgtcgtcaatcggcttttggccggctgaaagcgcctcttcctgtccgtcctttccgtatttgataaagcttgcattccgtccgtgaatctgatagcgcgggccgtttgccgcattcatagagccggattgaagaatgacctgaagtttgccgtaatggagcgcggccagaaaataatcgacggtttcactgttgtcccgctgtttcatcacatgtgccgtgacggattccggcattccgaaaagcaggagtgtctggtcaataatatgtgaaccgagatcatacagcgttcccgtggcgggtccgcttttttcgcgccatctttcttggacaaccggattgtacagatcgtagttgacttgatatgtatgaatgtcttgaagcgccccgtcccgaatcagcttttgtatcgttaaaaagtcattgtcccagcgccggttgtggtacacgctcagtaagacgcctttatcttcagccgttcttctcagttcctccgcttctgctgaagtcgccgtcatcggtttttccacgacggtgtgttttcccgccaggagacatttcatcgctgattcataatgcattccgctcggtgtcgtaacgatgacgagatcaatgtcaggatcaccggtaatgtcttcaatcgcgcgcacggcttcagcccccggcagatcacgtctgacctcatccgttctggaggtcatgacttttttgatctgataatcatcaaggacgtccaaaagcggcgcatgaaagactttacccgacaaaccatatcccaatatgccaacctgtatcgttttcaatgaatttccccctcttgatatgtgataacattatataccccgcgggtgtactggtaaaacttgtgtgttgaaaattttttacaccggattttcaagtctgtataatgaagataacgaagaaaaaaaccgaggtggaaaatggacaaacataccgagcatcaatcgttaaatcataaaagcgccaaggaaaaagaccagattctgaaccggctgaaacggattgaaggccaagtcaggggcattcagaatatggtggagaacgaacgatactgcgtggatattctcgtgcagatttcagccgtgcaggcggccatgcagaaagtcgcgtttcatctgctggaagatcacgcccatcactgcgtagccggcgccattgagagcggaaacggggagcaggcgattgccgagctgcttgatgttgtgaaaaaaatcgcaaaatcgtaaaataaaatgttttgaaataccctacaggggtatggtaacataaaaaagaaaaaacaagacgtggagggaatcatcatggaacaaaaaacactgcaagtggaaggcatgtcctgtcagcactgcgtaaaagcagtagagaccggagtgggagaactgaacggagtgacggcggttcaggtgaaattggaagccggacaggtggatgtgacgtttgatgagcacaaagtctccgtatcagatataaaagacgcaattgaagatcaagggtatgacgtcgtataaggtttatcgcgctgcgggaacgggcgcggttttcttttatcataattataccctcgtggggtttatgaagagagatgaggacattgagtgaaccgaaagaaatgaccattcaagtggggggcatgacatgcgccgcctgcgcttcaagaattgaaaaagggctgaaacggatggacggcgtcaatgacgcttccgtcaatcttgcgcttgagatctcaaatatttcctatcagcctgacaaaatcgaagctggcgccataaaggataaaattgaaaaactcggctatcacgtcgtgacggaaaaagccgattttcagattgaaggcatgacgtgcgccgcttgcgccaaccggattgaaaagcgcctgaacaaaacagagggcgttgtgagcgcaccggtgaatttcgccctggaaacagtcaccgttgaatacaatccgaaagaggtgacgccgaaagagctgaaagagaccgtggcaaaactcggctaccgattagacgggaagaaagcggttgatggagacggcggattatcccaaaaggagaaagagcagcgaaagcagctgatcaggctcatattttctgccgttctctcctttccgcttttatggtcgatggtcagccatttttcttttacttcttttatctggatgccggatatcctgatgaatccgtggctgcaatttgcgcttgccaccccggtgcagctcgtcatcggctggcctttttatacgggagcgtacaaggcgctgagaaacaaaagcgccaatatggatgttctcgttgcgctcggaacgacggccgcttacgcatacagcctgtacatgacgattgcgtctctcgggcgagacggacatgctgaggggctttattatgaaacgagcgccattttgctgactttgatattgcttggaaagcttttagagatgaaagcaaaaggccgctcatcagaagcgattaaaaagctaatgaagcttcaggcgaagacggcggcggttgagcgggacggcaaagtacaggtgattccgattgacgaggtccggacgggggatatcgtatacgtgaaacctggagaacgcgttcctgtcgatggcgaagtgattgaaggccattccgcgattgatgaatcgatgattacgggagagagcatgcctgtcgataagtctcccggaagcaccgtcacaggggcgacgatcaatgcaaacggctttctcaaaatcagagcggtgaatgtcgggaaagataccgcgcttgcacacattattaaaattgtggaagaagcccaaggatcaaaagcccccattcagcggctcgcggatcacatttccggcattttcgtcccgattgtgctggggctggccgtgctgacttttctcatttggtatgtatgggcggcgccgggacagttttctgaagcgatcggcaaattcatcgccgtgcttgtcattgcctgtccgtgcgcactggggctcgccactccgacgagcattatggcgggctccggccgtgcagctgaattcggcattctctttaaaggcggtgagcatttagaaaagacccagcgtctgacgacaatcgtactggataaaacaggaacggtgacaaacggcagaccggttctgacagatgccgtaccggcagagggaatgaacgaagaggaactcctgcggctggcggcggccgccgaaacgggatcagagcacccgctcggagaagccatcgtgtcaggagccgaaaaacgggggatttccatcccgaaactcacccggtttcaagcccggatcggttccggaatctatgcagaggctgacggcagaacgattctagccggatcaagacggctgatggaatcagagcatattgaacatgaagcgctgcttccgcaaatggcccgcttggaggcggaaggaaaaacggtgatgcttattgcggcagacggcaaagcggcggggcttatcgcagtcgctgataccattaaagaaacatctccggccgcggtgaaacgtctgaatgatatggggcttgacgtcatcatgatgaccggtgacaacaaaaagaccgcggaagccattgcaaaagccgcgggcatcggcagcgtgatcgccgaagtgcttcccgaacaaaaggcggcggaaatttcccggctgcaaaaagaaggccggcgcgtggcgatggtcggtgacggcatcaatgatgctccggcgctggctgtggccgatatcggaatggccatcggcaccggcaccgatatcgcaatggaagcggcggacattacgctgatccgcggagacctgaacggcattgccgacgccatcggcatgagccggctgactatgagaaacatcaagcagaatttaggatgggcattgggctacaacagcatcggcattccgattgcggcagccggctttctggctccgtgggtggcaggcgccgccatggcgttcagctcggtatcggtcgtgcttaatgctttgcgtttacagaaggtgaaaaaagacaaaatcggctgatgccggttttgtcttttttattgacactttattcaaagcctgcatataatagagaaaacacttatatgagtatatgctcatatatataaattcgtttacctgtattgatgttatgggaatcctattacggaaagtagggtgagtcgaaaatgaaagcagccaaaggtgaatttgtattagacggacttgattgcagcaactgtgcaaaaaaaatagaaaacggcgtaaaagccattgacggcatagacggctgtgctgtcaattttgcggcaagcaccatcacggtctcagccggcgggaaaaacgagcaatggatgaaagatgaagtcgcgaaaaaagtaaagtccattgatcctcatgtgaccgttcgttcgaagcacgaagacaaacccggtgaggatgaataccgcaaaaagctgcagctgatgttagtgagattggcggcgggcgccgttttggccgtcatcgcttacttcgcgcacacgggcgccgtccttgagtttctgctcttttttgcttcatatttgatcatcggcggcgatatcgtagccagagcgggaaaaaatattgtccgcggccaggtatttgatgagcattttctgatggcgcttgccacaatcggcgcatttatcattcatcaatatccggaaggcgtcgcggtcatgctgttctaccagatcggtgaattgtttcagggagcggccgtcagccgatccagaaaatcgatcagcgcgttattggacatccgtcctgagtacgccaatgtgaaaacggaaaacggcatggctgccgttcccccgcaggacgtcaaagtgggacaggtcatcatcgtgaatcccggagaacggattccgctggacggaaaggtgctgagcggttcctcgatggttgatacatccgctttaacgggcgaatccgtgccgagaaaagcggagccggggcaagaggtgatggccggatttatgaatcagaacggcgtgcttcatattgaaacctctaaagggtatgaagactctgccgtgtcaaaaatattgaatctggtcgaaaatgcggccggacgcaaagcgaaaacggaaaactttattacgaagtttgccaagtactatacaccggccgttgtcattgttgcggtgcttctcgcctttttaccgccgcttctcgtgccttcagccgcgctatccgactgggtgtaccgcgcgctgattttccttgtgatttcttgtccgtgcgcactcgtcgtctccattccgctcgggtttttcggcggtatcggggctgcgtctaaagcaggggtgctcgtgaaaggcagcaactatttagaagcgctcaatcaggtggcatacgccgtgtttgataaaacgggaaccttaacgaaaggcaatttcgccgttactgatatcaaaccggcggcaggatttacgaatgacagcctgcttcatgcagccgcgcttgcagaagtccattccaatcatccgattgcttcttccatccgcgaagcttacaatcaaccgctcgcggctgaggagattgaagaatatgaagaaatacccggacacggcattcgggtgaaaaccggcggatcaacgattttggccggaaatcaaaaactgctggcaaaagaacaaatcgcttccggcacagctgaaaataacggaaccgtcgtttatgtcgccgtggatcagcagtatgcgggggcaatcgtgatcgccgatgaaatcaaagaggacgccaaacaggccattgccaatttaaaagcgctcggcgtgaagcggacagtgatgctgacgggtgattcaaagcagaccggagaagctgtcggcctcgagctcggtattgatgacgtgtacacagagcttttgccgggtgacaaggtagaccgcgtcgaagaacttgaagcggcgctttcaccgaatgaaaaactgatgtttgtcggcgatgggattaatgatacgcctgtgcttgccagagctgacatcggagctgccatgggggctctcggttctgatgccgccgtcgaagcggccgatgtcgtcctgatgacagaccagccgtcaaaagcagccgaagccatccggattgcacgccgcacacgccggatcgtctggcagaacatcggatttgctttaggcgtaaaaatcatttttctcttgcttggcgcattcggattcgccaccatgtgggaagcggtcttttcagatgtaggcgtcacgctgatcgccgttgccaacgcgatgcgcgtcatgagagtgaaagcggaataattgtcaaagataattcgtttttcagggttttcttaaacaaggttgtcttggtaaaatagagaagcgggccatccggcatccgcttcttttttattttaaaaacaatgaggtgtctgagtgaaaaagaaacaatcgtctgcgaaatttgcggtgattctgacgttaatcgttgtcgttttatttgcggccatcgtaattattaacaaccaaacggaaaaagcgggcgaaacagtcgccgaacagccttccattaaaggacagcccgtgctcggcaaagacagcgcgcctgttacggtagttgaattcggagattacaaatgtccgtcatgcaaagtatttaacagcgatatctttccgaaaatcaaaaaagattttatcgataaaggcgacgtgaaattttcatttgtgaacgtcatgtaccacggaagcggctcgcgtctggcggctcttgcttcagaagaggtgtggaaggaagacccggcatcattctggactttccatgagaagctgtttgaagagcagccgtcaagcgaacaggaatgggtcacgcctgcattgcttgaaaaaacggtcaaaagcaccgcgaaaaaggttgatcctgacaagctgaaggaaaaccttgataaagaaaccttcgcaaaagagctgaaagctgacactgacctgaatgataaattaaacattacggcgacaccgacgatttatgtaaatgacaaggtgattaatgacttctctaaatatgatgagatttcaaaaacgattaagaaagagctgaaaaatgaaaaatagaatcgtgtttttatatgcttcttgggtgatagctcttgctgccatgctcgtcagcctttatttcagcgagatcagaaaattcataccgtgcgagctgtgctggtatcaaagaattctcatgtacccgcttgtcctgattttaggaatcgccaccttccagggtgacacgcgcgtgaaaaaatatgtgctgccgatggccgtcatcggcgcatttatatcgaccatgcattaccttgagcagaaggtgcccggtttcagcggcatcaagccgtgtgtctacggcgtgccttgctcatctgaatatattaactggttcggtttcattaccattcctttcttggcattgacggcatttattctcattattatctgcatgtgttttgtcaaaacggaacgcacggcaaaataaagagcctgctccatgggagcggctctttttctattatttgtaccaagctttgtttgtcgcaatctgtctgttatgggagctgtcccaaatatccacggaataggcataatcataattcatgacgcagcggatgccgctgccttgggcgtcatgctgaagtccgaagttatgggaaaactcgtgctgtgccgctttcgccgtgttggccgttccttgatcaaggttcacgctgaaagccgggccgctcggtttgccgttatatacatacgcgataccgccggcgtcaaaactcgattttgcggtaaaaccgacgacaaaatgataattttgatttctgaagctgctttggagattcgataaaatctgagaactgtttgagccggaagaattccaagcctgcacggcctgtacgacgaaatcaatgttgtgatcacggttaaaagcgacatccgcctgctccacgatctggacgattcgcgtttgccagtcgctgtatttggcgcggtattcagcgtccgccaccgccagcactctgaccttctgggagcccgtgctggctttagttgaggctttatcctgactgacattggcattgaatcgtttcgtgccggcctgcttgccgttctcatccagaatttttgtgtcaaccgtctgttcaacttggaccgggcctttcagatctttaaaatgatcggctttcggaagcgggtccgtatacaccgttttcgccggctccgcatgagtgtgcgaatgcgtatggctttcggctgacggcaggccgggaattaatccggcggccaataaaacaggaaaaacaagtgaactgattttcatctcataaccccctttttgttagagaaagtattcaatgaaacttccaataaaccttccattaaagtataaaataggaaaatattcttgctttcagccgttgcggatgaggttgtcccggatcaggaatcagaatctttcaaaaataaggttgattttaagagaaagcgattataaaatctaatggtcgtcagaaaatttaacaaataaaaaggagcatatggaatggcctgggagctgcttagtgtaatcggcatcattgcgtttgcggtcagcggagcgattgttgcgatggaagaggagtatgatattttaggcgtgtatatcttggggattgtaacggcgttcggcggcggagccatccgaaacctgctgatcggtgttccggtctccgccttgtgggagcaaggcgcgttttttcaaatcgctctcgcatcagttacgattgtctttttgtttccgaagctgctgttaaggcattggagtaaatggggcaacctatccgatgccatcgggctttcggcgtttgccatccaaggcgctttatatgccgtgaaaatgggccatccgctcagtgcggtgattgcggcagcggtcctgaccggcagcgggggcggcatcatacgggatttgctcgcgggcagaaagccgcttgtgctcaaggcggaaatttatgcagtctgggccgcgctcggagggttaatcgtgggcctcggctgggccggggatgccgccggtttgtatgtgctgtttcttgtgcttgtggcatgccgcatctgcagttatgtgttcaggtggcgcctgccgattcgttcctatcatatagaacagtaaaaaaaccgatttcacaaacgaaatcggtttttttgcataacggcttctgataaaaaaagacgcccgatatgataagaaaaagggtatttgaccataatgctgaataatatgttgcatatatgtttgtatgatgaaagccggacttgtcagcttgatgtcggaggtgccgctgatggcaaaacgtgataaagagtggaaagaagagcaggaaagaatcaattttgtcatgaaggaactggaacagaaacaaactcatcttgaagcctcatcgggcggattgaagcaggatattgtcggcctgagaaaaacgttttgggatgatgtcaccgtgaatatggatgatgcccacgaagcggctgagacatttttaagcattaaacagcaggcggaaatgctttcagaacgtgaacggacgcatcggcttcaataccggcagcttcaaaaaatccaaaagctgaaaacctctccttacttcggccgtgtcgattttacggaaaaaggggagtcctcttccgagcggatttatatcgggctgacttctttaatggatgaaaacaacgagcaatttctcatttatgattggcgcgcgcccatctcatctctttactatcaatattccccgggaaaagcccgctatgaagttccggaagaaacgatagagggagacatcacactgaagcggcagtttatcattaaaaacgggacgcttaaagcgatgtttaacacggatatgacgattggtgacgaaatgctgcaagaggtgctgagcggccattccggacagcatatgaaaaacatcgtgtcaaccatccaaaaagaacagaacgaaatcatccgggatgaaaaaagcaaatatctcatcgttcagggagccgccggaagcgggaaaacatccgcggcgcttcagcgggccgcttacttgctgtaccgcgggcgcggggtgcttgatgcccgtcagattgtattgttttccccgaacattttgttcaacagttatgtgtccgccgtattgccggaattgggagaagagaatatggagcaggccacctttcaggaatatatcatccgccggctcggacgaaagtttgattgtgaaagcccgtacgagcagcttgaatattgcctgactgaacaaaataaggacgcactttccgtaaggctcgcagccattgcttacaaagcgtcatcagcttttcaggccatgattgaccgctatgccgggtcgctttcggtctcgggcctgaaatgtaaacagatcagcttccggggagacatcctgatttcaaaagagcggattgaagcctatttttattcgcttgatcagcagctgccgattccgaacagagcggagctgacggcggaatggcttctcgcggaaatcagcgctctcgaaaaaaaggagcgtaagaaggaatgggtcttgcaggagagcgagctgcttgataaggaagactatgctgaggtttatcaaacactcaagaagcaggcggcagatgatgaacctgcatttgacgaccatcagcgcgaacagcgcctgcttggcgccattattgtcggcaaagcctttaaaccgattaagcaggccgtcagacggctcggctttctcgatataaaacggatgtatctccggctgttttcagactggggagctgatgaaaagcccgatcattgggagagcatcggcgctttgaccggaaacgcatttgcagaacggtcgcttccgtatgaagatgccgctccgtatctgtatttgcaggatctgttagaaggaaaaagaaaaaacacacaaatgaagcacgtcttcattgatgaagcgcaggattattccccatttcagctcacgtatattcaaaccatcttcccggcggcaaagatgacggtgctcggtgatgtcagccagtcgatttatgcccataccattacgggcccttcttccctcgccggctgctttcgcaatggtgcagaaaagtatgtcagcctgaagcggacttacagatcgacgcggcagattgttgaatttacgaaagcgctgctggctgacggcgatgacattgagccttttaaccggaacggggaaaaaccgcgtgttttgcggacggatacagaaaatgcgcggcgggaacaattggcggatacaatccgggagctcagacaaaaaggctgggagacggtcgccgtcatctgcaaaacggccgcggaagccaaaaaagtgtttcaggcggtcagcgccgagagcggtgtccgtttaatcaataaagaaaaccagccttttcaaaaaggggtatgcgtcattcccgtttatttggcaaaaggcattgagtttgacgccgtcatcgccgctgacgcctctgctgcccagtacaatagcgaacatgaccgtaagctgttatatacggcctgtacgcgggcgatgcatcatttgaccgtattgtctccgggagaaccctctccttttataaaagaagtgcccgccggcttattcgtataagccctttgctgagtgcaaagggctttttatcattagtaatcttaatcgttgtcatcatgattatatattttacttacatacaaactttcggtaaagtttcaattagaatattattttgacaattcctatagaaataacgtacgttacgtttaattccttgtgaggtggatatcgttgcaacttcaggtcatgaacagtccgtttaatcaggagcaggcagagctccttaaccgccttctgccgaccttgacagaatcacagaaaatctggctgagcggctatttggctgcggcccggtccgaatccggtgaaacagccgcgcccgctgctcaggctcctgctgaaagcccggcagtctcgaaagaagtgaccgtattatacggatcgcaaacgggaaatgcggaaggtcttgcgaaacagacggtaaagacgcttgaggaacggggattccaggtcaccgtcgcgtcgatgaacgattttaagccgaataatctgaaaaaagtaaacaatttactgatcgtggtgagcacacacggagaaggcgatccgccggataacgcgctggcctttcatgactttcttcacggcagacgcgcgccgaagcttgaagagctccgttactccgttttggcgctcggggacagctcgtatgaatttttctgccagaccggcaaagagtttgacgagcgtcttcaagagctcggcggcacccagcttgcgccgcgggttgattgcgatcttgattatgatgagccgttttcggaatggcttgaagcggtcatcggcggtttgaacgaaggagcgggaaatcaaacagccgaagcgcctgccgagacgcccgctctcggtgaatccgtttattccagaacgaacccgtttcgggcggaggttcttgagaacatcaatctgaacggacgcggttcaaataaagaaacacgtcatctcgagctttcgcttgaagggtcgggcctcgcgtatcagcccggagacagcctcggcatctatccggaaaatgatccggcgctcgttgatgagctgatcaatgagctgaaatggaatccggaacaggaagtggcggtgaataaacaaggagagcgccgtccgctgaaagacgcgcttacttctcattttgaaattaccgtcttaacaaagccgcttttgcaaaaggccgcacagtttatggctgatcaaaagctgagtgaacttctggccgaaggaaacgaagagcagctgaaagcatacaccaacggccgtgatctgcttgatctcgtccgggatttcggtccgtgggaagcttccgcggaagactttctttcgatcctgcgtaaaatgccggcccggctctattcgatcgcaagcagtttagaagcgaatccggaagaggtgcatctgacaatcggagcggtcagatatgacgcgcacggcagagaacgcaaaggcgtctgcagcattctttgtgcggaaagactccagccgggagatacgcttccgatttacattcagcacaaccaaaacttcaagctgccggaaaatccggatacaccgatcattatggtcgggccggggacaggcatcgcaccgttccgttcctttatgcaggagcgtgaagaaaccggagctgaagggaaaacatggctgtttttcggggatcagcactttgtcactgattttctgtaccagacggaatggcaaaaatggctgcaaaacggtgttcttacaaaaatggacgtcgctttttcccgggattcggaggaaaaagtatatgtgcagcaccgcatgaaagaacaaagcaaagagctgtatgaatggctgcagcagggagccgccgtatacatctgcggtgatgaacagcatatggcgcatgacgtgcaccaggcgcttctcgatatcattcaggaagaaggcggcatgagccgtgaaaaagcggaaagcttcctggcagacatgcagcagaaaaaacgctatcagcgtgacgtatattgattttggtttgaaaggagcttattcagcatggtgaacaacattttaaaagcgccggaaggccctccaagtgatgttgaggaaattaaagaaaaaagcgattatttgcgcggcacattgaaagaagtcatgctcgaccggatttcagccggcatcccggacgatgacaaccggctgatgaagcatcacggaagctacttgcaggatgaccgcgatctccgtaatgaacgtcaaaaacaaaagcttgaaccggcttatcagttcatgctgcgtgtccggatgccaggcggcgtgtcaactccggaacaatggcttgtcatggatgaactggcgcaaaaatacggaaacaatacattgaagctgacaacgcgtgaaacgttccaaatgcacggaattttaaaatggaacatgaaaaaaacgattcagaaaatcaatgcggcgctgctcgataccattgcggcctgcggagatgtcaaccgaaacgtcatgtgcgcttcaaatccgcaccagtctgaaattcatgcggaagtatacgaatggtcgaagaaattgagcgatgaccttcttccgcgcacgagagcctatcatgaaatctggcttgatgaggaacgtgtggcgggaactcctgacacggaaacggaaccgatgtacgggccgctgtatttgccgaggaaattcaaaatcggaatcgccgtgcctccgtccaatgatatcgatgtcttttctcaagatctcggcttcattgccatcgtggaggaaggccgtcttatcgggttcaacgtggcaatcggcggcggtatgggaatgacgcacggcgatacggccacttatccgcagctttcaaaagtcatcggcttctgcaaaccggagcagctgtatgatgtagcggaaaaaaccattacgattcagcgcgattacggaaaccgttccgtcagaaagaatgccagattcaagtacaccgttgaccgtctcgggctggaaaacgtaaaagccgagctggaaaaccgcctcggctggcagctggatgaagcgaaaccttatcattttgaccataacggcgaccgttacggatgggtgaagggcgtaaaagggaaatggcactttacgatgttcatcgaaggcggccgcgtcacggactatgagaattataagctgatgacgggattgcgtgaaatcgccaaagtccatacgggagatttccgtctcacctctaatcaaaacctgattatcggcaatgtctcgagccagaaaaagaaacaaatcagcgcattaatcgaacaatacggtctgacagacggctggcagcattccgccctccgccgcagttcaatggcttgcgtcgcgcttccgacatgcgggctcgccatggccgaagccgagcggtatctgccgaagctgattgataagattgaagacattgttgacgaaaacgggctccgggatgaagaaatcaccatccgtatgaccgggtgcccgaatggctgcgcccgccatgcactcggcgaaatcggatttatcggaaaggcgcccggaaaatataatatgtatttaggagcggcgtttgacggcagccgtttgagcaaaatgtaccgggaaaatatcggtgaagaggaaattctgaatgagcttcgcaccattctcccgcgctacgcgaaagagcgtgaggaaggcgaacacttcggcgatttcgtcatccgcgccggcatcattaaagcgacgacagacggcacgaattttcacgaataagatgagctcttaaaaccaaggatagagacacactggcggtgcgttctctatcctttactaagcagcataaacgctgctccgcgtcatgaaacagatgacgcagcttgcgaaaaagcctgttttcagagaaaacaggctttttctttttccggaaaaaatgtagctgaaggcaaaaaaagttcgccgtgagcgcgttatgagaaattttaaataaaaacgggtaaaataaaaggagaatggttgcgtgcggaaaatatattgaatctgcccgatcatcggctccggcctttgacaagggcagagaacaggcaataatgatatgatgcagcagatgaaggaggtcagctttggacatatttttagtcgtactcgtacttttaaccattatcgcgatctcaaatatcgtaaatcggtttgtcccctttatcccggtgcctctgattcaggtggcgctcggtatcattgcggcgtcatttccgcaggggcttcattttgaactgaatactgaattgttttttgttttgtttatcgcgccgctgctttttaacgatggaaaacggacgccgcgtgcggaactttggaatttaagagcgccgattctgctgcttgcgctcgggcttgtgtttgccacggtgattgtcggcggttacacgattcattggatgattccgagcattccgctggccgccgcgttcgggctggcggcgattctgtcaccgactgatgttgtcgcggtcagcgcgctgtcagggcgtgtgaagatgccaaaaggcattctgcgtctccttgaaggagaagggctgatgaatgacgcatccggcctggtcgcttttaaatttgcgattgcggctgccgtgacgggcgcattttcgctggcgcaagccgcgttcagtttcgttctgatttcagccggcggtttactcagcggtgtcgtcatttcttttttgattatccgtttccggctgtttatgcggcgcctcggcatgcaggatgtcacgatgcatatgctgattcaaattctgacgccgttcgtcatctatctcgcggctgaagaaatcggcgtttccggcattttagcggttgtggccggcggcatcacgcatgcggtggagcaggaccgtcttgaatcaacgatggtcaaactgcaaatcgtctcttcaagtacgtggaatattattttgttcattctgaacggtcttgttttcgttattttaggtgcgcaaataccggatgtggtttccgtcatctttaatgataccgcgtttaacaatatgatggtcatcgggtacattatcgtcattacgctgacgttaatgattctcaggtttttgtgggtgctgtttttttggaacggcaagtggttttttaacaaggatcagagcatttataaacccggcctgcgctcgaccctgctgatttcggtttcaggcgtcaggggagcggtcacgcttgcgggttccttttccattccttacgtgctctctgacggctcaccgtttcctgaacggaatttgattctctttttagccgcgggcgttattttgtgcacattggtgctggcgacaatcgttctgccgattttgacagataagccggaagacaatgtgaaagaaaagaaagtcaaattgctgacagcgagacggaagctgataaaggctgccttaaccgccattaaagaaaatatgaatgagtcaaacaaaacggcttcttttgcggtcattgccgaatacaatgagaaaatgaaaaatctcaggtttcagcagttcaccgtcaaaaaccgcacgaaaaaagatgagcggaaagtccgcgcccaagggattcaggcagaacaggaagaattgctgcggctgattgagcggggcgacataccggaagaaacggctgacagccttcaggaacggtttgatgaactggaagtgctttatacgaacccgtttaaagtcggcttatctaagaaaaagctgaaacgcctgatgtactggatctttttcggcgaacataaaaaaccggaaatgtcgattttaaatgaagaaggcctcattcgctccacaagggttaaaacggcaaaagcggccattgaaagcctgaaaaaacacatgactgaagaaaataaagatgtgacgcttgccgtcatttccttttacaatcacttgattttcaggctggggcactcgtatcacgaacagagtccgagtcgccgttttgaaaatcaaaaactcgaaatcaaactgcgggccgtgcaggccatccgcaacgaaatccaaacattattcgaagagcgggaaatttcccgcgacatgtcgcatgagcttcgccaatacatcaatgatgtggaagcggccatgcttgacggagatgaataaaaaaagtccggcatctgttcgccggacttttttagattacggacgatggaattcgacgtgatcgccgtcgcggtcaaaccagcctctgaaggcccagttgatccagccgccatctcctttgttggtgaagcttccgtcttcaaacacccaaatgccgtacgtgatgccgtcataaacggcggaaccgtaaaactgaacgccgttaaaatgatcttcatattcctggcttaaattaaacaccatgacattatatttttgtccggaagcgtagaatgaagattccattaagtttttgacgaagccgtcacggttttgcgccgacttaatcgcgtcagcaatcgaattgccgatgccgagcaggtcaacgtcaatgtttaatccgacatcttttgctgagacatctgatgtttgctgagccatgttttgaggggccgggttttcttttgcggatacaaaggacagaggagtcagagacaaagcggcgccaagggcaacggacatcgggatacgcatacgtttcatatgatttcctccttcaattgtgtggtggctacagtagcgatttacccggacagttacctgattaaccgtaatttttgaaaaataggaaaataataacgtcagtggtgcttgggcactaaagatggtttttgtgataacgatgagcgtataattggtttcttacggcggaaatgtgagataataataaccgtttacataatgactagaaaggatggttcaacgtggcaaaaagcttaaaagatactgtaaagcttcataatggcgttgaaatgccgtggttcggccttggcgtcttcaaggtggaaaacggaagcgtagcggcggactccgtcgaagcggcaatcagaaacggctaccgcagcattgatacggcggctatttataaaaatgaagagggtgtcggcgaaggcatcagagctgcgggcgttgccagagaagagctgttcatcacgtcaaaagtgtggaatgaagatcaaggatacgaaacgacacttgacgcgtttgagaaaagccttgagcgcctcggcctcgattacctcgacctttacctgattcactggccgggcaaggataaatataaagacacatggcgcgctcttgaaaagctgtacaaggacggcaaaatccgcgccatcggcgtcagcaacttccaagtgcatcatttagaagaactgctgaaagatgctgaaatcaagccgatggtcaaccagattgaattccacccgcgcctgactcaaaaagaagtaagagatttctgcaaagcgcagggcattcaagtggaagcgtggtctccattgatgcagggacagctcctcgataacgaagtgctgtcacaaattgcggaaaaacataacaaatcggttgctcaagtgattttgcgctgggatcttcagaacgaagtcgttaccattccgaaatcgattaaagagcaccgcatcatagaaaatgccgatatttttgatttcgaactgtcacaggaagaaatggaaaagatcagcgcattgaacaaagacgagcgtgtcggcccgaatccggacgagcttctgttctaagaaaaaacagccctttacggggctgtttttctttacataaatgtctgtgtctgacgttttacgctgaacctgtatgcggctattaataacagggcggcggcgaaggctcccaaaatgatgatgttcagcgtcaggctttggagcgtgcggccgtgctgcaattgatcgaccgtatcaagcacccagcgctgaggcagaaattcggcgattgtctgcactgttttcggcataatattgcccggaaaaaagcagccggcgagcaagcatgtcggtacaacgatcaagttcaaaagcgccgatgccgaagagctgctgttggaaaaaccgacggcaataaaggcgatcccgattgcgcttaatgcaaacagcatcatcaggacgaacagctgccacagcgggaatgacggatgaatatgaaaagcggcgcccataaagagaacggcgaatataatttggacggccatgataatgatattcactgccgcattcgccaatacatactgctttgacgtgatcggcgttgacagaagcctgtagtacgtcctgttttctctctctttaatcatcagttccgtcaggttgccggcggaatagagcataatgataatgagatacccgatgactgagtaagtcatttctttatggttcgaagtatctttcaaaacagcggactccgtttgaatcggagaatgcttgaaatcggcgtacatcgcctgaaaggctttctcgtctccgccggaagatttgccgattgaggcggcgctgttcatataattgtacaaataagagctgacatatccggtgacctgggcgcccttcagcgaggtcatgccgatgtgagacggtttcccgtcttttacgctttgggagaagcctttttcaaacgtaatgagcgcctccatttttcctgaagcgatctttgatgaggcggacgcatccgtttcctccgaaatcttcacatgatccagtccttttaaaaacgtgaccgtatcctgtgccacttctccgccgtcctgatcgagaatgccgatattgagcgtttcggctccgccgttggcattggtcatgaaggagaggaagacgccgatcagcggagccccgatataaagaatgagctgttttttgctttttgtaattcctttgagagtgtgtgcaaacagccaccagaagtttttcatattacagtccctcccgtctttgaaacgtaaatgcggcgatcagcaaaaagagtgccgccaatgctgtatttaaaccgagtgcaggccatgccgctgatacatcatttgcgtaaatgatgttgttaatcgccttattgatccaggataagggcgacagggcggaaatccccctccttcatatttgtaataggcgccgccgataatggacatcacctgcacgatgatgacggtgattaatctggcgctttcgggttttctggtcaaatagctcaggctgagcccgaagctgacggccaaaagaatttcagaaacgagaatcaacagcacaagtcccatgtggctgccccagttcgctttcaagataaatttgctgaaggcgacaacggcaagaatcgtcagaacattcacagccaaaatgccgagcatctttccaagaaagatatcgcttttccggagcggggcggcgatcaggcgatccgcggtgtgccgtattctttccccgcggaataaggagcttgcaaaaatcgaggcgtacagcccgatcatcgtcgtcatggatatcgcgtaaaaatctttcgccttcggttcttttgctttgtgtaaagacgtctgcttcatataatcgcttttgatttgtccggcggaaggtggcttatgcgccttgtaagcggcggcgcctgctttgtattgattggtaaaagcggtcagcatgccttggacgatcgtgccgttgatgccgctccggtcatttgtatagacttgaaaaccggtgttttttacagtgacgaaagcatccgcctgattttcacgaacctcgtttttgccttttgcctccgtgtccgctttttgaaaatagacatgctcttttttggcgtttttcataaactcagtaaagtaatgagaaagtgtcccgtttgattggtccgtatatacgaccttgatgttcccgaccgtcacctctgaatcaaaggcgtttgataatgccgcggtaaaaatcagcatgaagacgatcggaaaagcaagcatgaaaataaaagtccgtctgtcgcggaaactgattttgatttctttcccggcgatgtgcagaatattcatttgcaatcctcctttcaatagggtcagtcgcgcagacttctgcctgtcagcgtgagaaataccgtttctaagtcaggtgcctgttcctgcaaggagcggatttcaatgcctttgtccatgaagtaccggatcaggcggtttaaattgttgacccctgtgtcagagctgattttcacgctgttttcttccagtgcggcggctctgacgccgggcagctcctgaatatcgccgaggctgatgccgtttccggatgacagctcaatcacgacgtccttcgtgtcggtaatgatggaggtcagctgttcttttgtgccttcggcgatgacttttccgtggtcgatgatggcgatgcgtgtgcatatttcttccacttcctccatgtagtggctcgtgtaaatgatcgtgcagcccatttcattgagctttttcactgattgcagaatataatttcttgattgcggatcaatgccgaccgtcggttcatccatgatgatcagtttcggccggtgggcaagggcgcaggcgatattaagccggcgtttcattcccccggaaaaatgcttcggcaaatatttgtgtttatcgctcaagccgacgaatgtcagggcttcctcgacccgttctttcagagccgcccctctcaggccgtacagacctgcgaagaacttcacattttcataggcgtttaattcctcgtaaatcgcgaggtcctgagggacgatgccgatattcattttcgttgctttgctatatttgaaaatatcttttccgagaaacagaatgtctccgcctgaaggttttaaaagacctgagatcatattgatcgtcgtgctttttccggctccgtttgcgccgagaaacccgaaaatctcaccttcttttacggcaagcgacatctggtcaacggcggcataatcaccgaatttcttactcagctgtttgagctccaaaatgttcatgtttccacctctatgtcttatgatgctcttattataaaaaaaagaatgaacggccgttagtgcagctgttcattcctttgacatgagaatcttcatatttttcacatgaaaacattcacttattcaaccggaagcaatgtcgtgacggaaaaaccggccgtgccgtcaaaaataacggttccgtgcaggacggccgcccgttcttccataccgagcatgccgaggccttttttaaagcggacggcgccgtttccgttatctttcacttccgctttcacggctttattcagcacatggatatcaatgaaaatctgcgtggcatcggcgtatttcatcgcattggttaaagcttcggttacgttttcctgaatgactctccaatgcatttgcgtcagcctgtccaaatcgccttgatgcgtaaacggaaccggcatcccgtttttggccgaaaattcatcaataaacgttcttaatctgtgaatgcccatttgttcagcgggcggtttcatatttttcagcgttatgcggatatcctctatgccctctttggaaatggtaatggcgttttggagcagttcagccgctttgtccggatgggagccgagcatccgcttcgccgcttccatctgaatgagcgcgccggtcatcgaatggccgattttgtcatggatggcttgggacaatctgtttctttcctcgagtttgccggtgtactccgattgtttgatatattctgtgctgctgtgcagctgtttcgtcagtttttcaatgcttgagcgcatgctgtccgactgttcttcatatttcttcagccgattgccggaccgggcggccaaaacgaaaatcgccagacagaacaaggttatgacgatataagtcggaaggtcgccgtacgggataaataaaaacggcaaaaacacgagcaggcagaacacatagcggtgaaccggatattcggcaagaaccgcaaaaatggcgggcggcaaaagaaacagaaacgccggatggcctaaggcggaaagccaagcggtcaatgccagcgtcatgagggtgatcccgcgcctccaagcgggcggcctgatcatgcagaccgcgatgcccaaagacagataaagcagcagaaataagacggcgtacggcgtgtaagggcggtctaccgatacgaacaaaaaagccgtataaaaaatagcgatcagtctgctcatcagcatccaaaaatccataccgttcaacgcccgttatccaccttcccggtgatataaaaaatggcgatctgcgttctgtgctcaagccccgttttccctaaaatagatgaaatataattggccgtcgtcccttcagaaatgaaaagctgttttgaaatttccctgttcgagaatcctttcgcaataagcgacatgatgctgagctctctttcagtaaactggctttcatcaatctgatgcgcggcttccgccggccggaaaaggctgtcttttattttgtccagcacggtgtcctgaagaatgctgtgcccgttgaaaacgcttttgatcgcatcgcggatccgttccggttcggtgttttttaataaatatcctttcgcgccgtttttaattgcttctaaaatatactcatcgtcgtcaaatgtcgtcaggatcatcggcttcgtatccgtttcctcagcgatccgttttgcggcttcgacgccgttcatcaccggcatgcggacgtccagcaaggcgatatcgacggggttgtgcttacaatactctgccgcctcgagtccgttttccaacgttgctgatacagtaaattcctcatatgtatgcaaaatgattttcattccttctctgatgaaagaattatcatccgcgataatgacattaatcttcatagccgcaccctttgtgtgtttttgtttcattatataccatccgattttaaatcaaaaagcctcccggcgaaaggtgcgcggaaggcagatcggtcaagcgggctttttcaattggatgaaaaacagcatcagaaaagaaatgatcacaatacagatcacccacacccaggcgagtgtttcattgccggagtccatcgcgacgtaaatcgccgtcggcagcgtttgggtgacgccgggaatatttcccgcaaacattaaagtcgccccgaattcacctagcgcccttgcaatactgagaatgcttccggtcaagagggagggaaaggcaagcgggacggaaatacgggtgaacacctgccacctgccggctccgtctactttcgccgctccctcgatgtcagcatcaaccgcggcgaagccggttttagcggactgatacataagcgggaaggcgacaatggccgaagcgatcaccgcggccgaccacgtgaaaatgacgggctggtgaaaaatccgctcaatcgcccggccgataaagctgtgtttcccgaaaatgataatgagaatgaagccgacaacggtaggcggaagaacgagcgggagcataaacagggtctccacagccgtttttccgggaaatcgcgctttcgccatccaggcgccggcaagcgttccgagaatgatgacggcgatgcccgacgccaaagccacctcaaatgacagtacgacgggagtgaaaaactccgaagccgtaatgttacttggcagtaaatccatatttcttaaacactttcatcgcttcatctgactgcagatactgataaaacgcttctgcttctttacggtgctttgtatccttgacgatgccgacaggatacacgatcggatcgtgcgttttcgccggtgcttcatcggtgattttcacctttttcgaaatcagcgcgtctgttttatagacaagcccggcatcgacatttccggtttcaacataagaaagcacctggcggacgtcttttgcatagacggctttatcttttaccttgtcccacagggataatgccgtcagtgactgtttggcgtattgtccggccggaacggattcaggcgtgccgagcgcgattttttccgtgctgtcttttttcaggtcattcagatgtgtcaggtgtgcgctgtttttctcaggcacgatcatgacgagatcatttttcaaaagatccgtgctgtcctttttgtcgatatctccgtcatgaacgagcttttcgaatttatcttcggctgccgagaagaataaatcagctcccgcgccttgtgaaatttgtttttgcaatgtgcctgatgatccgaagttgtcttgaatggttacgtttgaatgtgatttttcgtagttggtctggatttcttcaagtgcatcctgagcgctggctgctgcagaaacggtcagcgtgacgttttcgttttgtccgcctttggacgattgtccggatgagcagcccgcagttgcgaggaaaacggccatagccgcagttgtgagtagtgtcgctttctttttcaacattgtgcaccccttatagctaaatatcattagatcaaactaattataacgcaattgtacgtgatggtgcggttttttttcaatatctgaacagttataataaaaacggagcgtgataatatgacagaagccacttcctatacaatagaagaagttgcgggccttttgaaggtctccaaactgacagtatatgatttgataaaaaaaggactcattccggcgtacagggtcggaagacagatgagggtcgatgaagaggacttaaaacaatataaagcaaacatgagaatgtcaaaaaagccatccgcagcagaagcgcctgacccgtcacgcgggcgggagccggaaaaaaggcagtctgttatcatcagcgggcaggatgtgtcgatggacctcctcagcaaacagctggaacaaacaatacaggcggctccgctccgcaagtacagcggcagtttgaacagcctgatcgagatgtaccgcggggcttgtgacatcgtcagtctgcatttatacgatggggagacggggcagtataacatcccgtatgtgaagcgcattctttcaggggagccgtttgcgctttttcatgtcgtgctgcggcaggccggattatatgtgaaaaagggcaatccgctgaacattcagggctttcaggacatgagccgaaaggatgtccgcatcgtcaatcgcgaaaaaggatcaggcgcgagggtgctgctggatgaacagctcagatcattcggcatcacgccgtctgatgtcgccggatatcatgacattgtcacggatcatctgtcagcggcttcacaagtatcaagcggaaaggcggatatcggagtcgggtcgctgcatgcggcgcatatggcaggcacggactttatcccggtgatcagtgagcagtacgatgtggtcgtcttaaaacaaaaccgggagcttgttcaaagcgtgcgggacattcttaattctgaggaattcaagtctcagctttctcaattatccggatatgatacgaaaatgacaggacggctcatatatgaaacatgaaaaatccctccatataacggagggatttttttattgcttataaaaccgcagcaggtcgccgtttaatattttatcggaaagcatcagctcttgttccgctttttctttctcatcgctgcacgcgctcatgtcagaaagcggttcacccgttttacggctgtaacacgtatttttcgtataaatatggtcatccgtgataaagctgccgtttctcagcaccgcaaacggagtccgctctccggaaaacagatcattgccgaactgaatgctgcctttcgtttcaatgccgagcaggtgaagcagcgtcggccttacatcaacctgtcccgcggccgaagcaatcgtttccggcgcacggtcggtcaccccgggaatatgaatgataaacggcacgcgctgaagctgaaccgtatcaaacggagtgatttcctctttccctaagaattcggcaagtccttgattatgggcttcggatataccgtaatgatctcccatcaggacgatcatcgcgttgtcatacagcccttcttttttcagcttcttgaaaaagtgtttcagagcctcatcttcatagcggaccgtcgtcacatagcggtttaataactcgctgcttgtgtccggttcctcaatgagctgatcctgttgatcaatttcaaaagggaaatggttggtcaaagtcagcaggcttgcgtaaaacggctgcggaagcttctttaatttttccgctgactgttcgagaaactccttatccttcaggccccagcctgttgaattttcctgtgtcaccttaaattcatccgcgtcgaaaaaacggtcgattccgaatgccccgtacatctcatcccggttccaaaaggctttatgattggcatgcagaacggctgaatagtattgacggtcttttaacatatggtacatcgtattgaaccggtggccgctttttgtgaaaaaaacggcgccgcttgaagacggatacagcgaattcgcagtaatgaattctgaatctgatgtttttccctgttcagtctgctgataaaaatgagtgaagtcataacttttttttcgcagtttgtttaaaaacggggtaatctcccgtccgctgacccgctcatccattacaaaacgctgtgttgattcgagcgtaacaaagatcacattgcgcccctttgcaagcccgaattttgaatcggacggcctgctgtagccggcttgagtgtaattcgcgaccgccgcaaggctgtcttcatcggcaaacgctttagcccctgcattcagcgtctgcgaaatggtgtcatacaaatgaaagtggaacaggccgattccttttacgagcgcttcacgatcaaaagggtgcttgaacagcttcggctgctcggcctcagacagcgcaaggttgcacagcatgaggccggctgatgcccacgcatacgctttaacggtacgggcgcccgcttttcctttatcggctttatgcctttttccaagataaaacaaaatcgcaatatccaaaaataaagcgatataaagcgggtgaaacagctcttggacgctgcttcccatatcacccatattgcttgcctgaaacaaaaccggtatggtgataaaatcaatataaaacccgtaaaacaccgtattcgcgattaaaattcccgtcagcatcacatttgccgaaagcagaaagatccgctgttttttttccgtcagcaagagggcgatgccgaacagcggcacaatgaagctcagcggattaataaggagcagacattcctcaagaaccgaattgttctgcagaccgaaaccgagcttatacacggcataggttttcatccacatgaacaggatggacaggcataaaaaccgatgattgctgaaaaaggttttcttcatatgtatgactcctcaccctaaaagcgaaaagacgctttttgtttaagagatgcggccgtgaaccagttcgtataaataatagcaggatacaatcgttaagccggccagcacaagctgctccgaaaagctccccgttctcatataaaggggaagacggaagcggatggcggacggaaacagcagtttaatgccgttgacggtccatgcgtcaagtacaagatggcttgccattccgatcatcagtccggcggaaatgctcggattcggaatataggttgccgtaatgaaaaacataataagcataaacagcaggctgtgtgtaaacgttctgtgcccgaacaccgtgcttacgactttggacagaacgggcagcgtcctgccgattttgcttttcgtatggcatatgtcgggaatcagcgccccgagggcacccgctgaggtcataaggaccggatcatacccgtaataatacgcaattgcggaacaagaagcgatgcctcccatgatgtgtgtttttcctgtcatttttcgcttctcctttttatttttgccaaaatcccctgaattacaaatatatcaagagaatgcatgtttgatcaacaaactttacctgttccgccaaaaggaaggagacgcggattccgcatattctgccgcggaaaaagacacattataggtgtacctatatttgataaagaggtgatacagatggctttctttaacaaagaaaaaggaaaaaacagcgataaaaacaaaaacgtcattcaaggcgcgcttgacgacgccagtgcagctctgaaagacgatccgcttcaagaagctgttcaaaagaaaaaaaacaaccgctgaccatataagacgggtagggcgaacgctctatccgttttccatctaatatttccctttgacagatctttttatctctgataacctctgagtagaattgaatgataaaaatcctcactctttctcggtgaggtagaggttgcgcttgatgatgagtcgcacatgccaggctgataaggggccgcaaaacatgtgttaaaggcatcagcgccgaagtgtaaagaaagccgatccttctttatgctgggactgtatctgaataagtgcaggactgccgcgtgctttttcgcggagggctatccggagatcaagggtgtgtgtgtttctttaagcatggacttttgttcaggctttttttgcgtgtaaatatggtctcggggtctggtccgtacgaatgaacaaccaggaggtacaggaatggaacagacgaaaaaatggggtttttggttattaacggcgtttgtcgtaggaaatatggtaggctcgggcatcttttcgctcccgagtacgctcgcaaaaatcgcgagcccgttcggcgccacatcggcatggcttttaacgggagccggtgtgttaatgatcgcgctggtcttcggccacttatccatccgcaagcctgagctgacggcggggccgcaaagctatgcgcgtgcgctgttcagcgatcggaaaaaagggaatgctgcgggcttcacgatggtgtggggctactgggtggcgagctggatcagcaacgtggcgatcatcacgagccttgccggatatttaacatcatttttcccgattttaacggataagcgtgaaatgttttcgatcggcggtcaggcggttacgctcggccagctgctgacgtttgccgtatgtacggttttattatggggcactcacacgatcctcgtcaccagcattaacggtgcgagtaaattaaatttcgtcacgacgttttcaaaagtattaggatttatcttctttatcattgcaggtttgtttgtatttcaaacgtcgtttttcgatcatttttattttcctgttcaaacaggtcctcacacggttgagggaatcggcggacagatccacaatgcggcgatttcaacattatgggcgttcgtcggaattgaatcggcagtcattttatccgggcgcgcccgttcgcagcgcgacgtgaaacgcgccaccattaccggattattgatcgcgcttggcatctatatcatcgtgacattgattacgatgggcgtgcttccgcatggtaagcttgtcggctcggaaaaaccgtttgttgacgtattgtacgcgatcgtcggcagcgcgggaagcgtcatcatggcgattctggcaattttgtgtctgttcggaacgatgctcggctggattcttctcggttctgaagttccgtatcaagcggcgaaatcaggagactttcccgctgcttttgcaaaaacgaataaacagggaagcccggttgtgtcgttaatcgtaacgaacgtaatgtcacagatctttatcttttcggttatttcccggacgatcagtgacgcgtttacgtttttaacgacggcggcgacgctcgcttatctgattccgtatctcgtgtcagcgttttacagcctgaagctcatttttacgggtgaaacgtatgacgagataaagggttcaagagtaagagacggtatcatcgccatccttgcctgcatttattctttttacgtcattattaccggaacggccgatttaacgacctttattctcggtatcgggctgtttttcgtcggtttgctgttatatcctttcgtctcaaagaaatttgcaaacaacagaccatcggtatgacaaaaagacatctcacgtctgtgagatgtctttttttgtttgcaacagcggattactttttgacggcgtgtatataatgaatggtctcaaatgcggttaaatggtcagtgcgtccgctgaaaaaacggtcattgacgtccgccggagatacatgttcataaataagcagacctgatgattctaatattttttcgatttctttataactgaaacacgataacatcggttctccgcctgctgcagccattttcaccatgttttccactctgtttgacagtcctctttcttcaaagagcgactcatctgcataatcaaacacgatagagcttcccggcgggacttcggcaaataattgtgtgagcaggcgggcgagatgctctttcgtaaggtagtatgacacaccgagcaggctgaaaaaggttttttggcgtgaaaaaccttcctgatacagacggctgaaagaaagcgaagcggcgaagtccatcggtacaaaatgaagatgatgggaaatgtcgagattcagatgtttcaatctgtttattttgtcttcctgtgaagcgggatgatcaatttcaaatatgtctaagacgtttgtcatctcaggatgcctgaaacagaaagtatcgagccccgcgccaaggataacatactgtttggccccgagcttcacttcattcaaaagcacttcttcacaatatgcggcacgggctaacggtgtaggagacagctgtacttgagtcacccattttaagatgtcatccggttggccttgaagcctctgtgccatgtctttactgaaaaatgatataccttgaatcagatgatcgcggatgtccgaatgctctttttcggaaatcagatcttgtgccataaaatcatcaaatatcaccggggtgtcgtatttactgtggtacgcccttccgaaagcggacagcagggaagtcatactcgccttgttttctttcatataaagatcctccgttatttacatcaatctccggccgggagaatcttattatacatgttaatccaaaaatgtaaattataacataaataaatttttttgtcaagttttaagcgtaataaaaagccgctgtgacagcggcttcggggttacttcgttaagctttttgtgatgtagtcgagctggccttcaagtgagatcgggtctgagaaatagaagccgatcggatcaatgcggtagacatggttttgtttgacggcatcgaggttcttccagattgagctgtcaagcacgcctttgtcgtcaccgccggcctgccatggccccataaagatgtagtctcccgcgaagtcaggcagtttctcgagtgaaatgctggcgtagcccggcccttgattaatggctttttcctgcgtcagttttgtggccttcagcccgagtttgtcataaatgatgcttccgccgcggccgaagtctttaccgaatacatagatgtcttttccgtttgtctgcatgatggagatggtttttgagccgaccgctttttgaacctttgttttagcggcagcggttttcttatcccattcagccagccatttgtctgctttatcttcagtgcctgtcattttcgcaaactctttgaattgatcaatgttgctgagcttgtcatatttaatggcgatggtcggcgcgattttttccagtttttcaatatcggcgccttgtgtcgtccagacaacgattaaatccggctttaagtcaatgattttttcaacggacgtgccgtcgccgatgtttgtgacaccttttgttttccctttgtaataagggtttttaaatacgttttgcggcgcgccgacaacattgatgccgagctgtttaaagtcgccgtagtagccgtcagccatgacgacgacccgtttcgggtgcttcggaattttaatattgccgttttcggctttatacgtgatggtttcttctttttcagaagaaccttttgtgtctgaagaattgccgcatgcggccaaagcggcgaagagcagcacggcaatcagcgctgcgccgattttcttgtatgtatggaacatctgacattccttctttcataaaaattagtgataaagagaatcattatcagtgtgattatatcactgctttcatagagaagcacgctctttttaaagaaaaactttctttttttatatgaaattaggtctattaaaagagaagataaaagtgctatactgaaacaagtcattgataatcattatcattaccattcttgttttgagaaaggaagaacgagtgttgggtctattgaaaaagaaacagacaatgacggctcaaggggcatcagggagtgaaatccagtggacggcgcgttcattccgggctgctgtgctgctgtgtgccggtattgcggttttattgatcggcgccgctctgtctgtttccatcggagctgccgatattcatctgcggacggtgtgggatgctctctttcactttcagccgcaaaatacatctcatcaaatcatacgcgatctgaggctgccgagaaccgccgccgccgcgctcgtcggggcttttttagctgtgtccggagcgattatgcaggggctgacgcggaacccgcttgctgagccttccattatgggcgtgacgtcggggtcaggatttgcgatcgcattggcatttgctttttttccgggtctgtctgcggcgggacttgttttgtggtcctttacgggagcgggaatcggagcgcttattgtgtttggcatcggcctgtcttcaaaaggcggtctgacaccggtgaagctcgcgctggccggtacggcagtcggctatttcttaacggggctttcaagcgcgattgcgatccgttttgatgtcgcccaggatgtgaagttctggtatgccggaggagtcgcttccgtcaaatgggaaggcatgcagctgcttttggcggtcggggttatcggactattgctggcatttctgattgcgcgctcagtgacggtgctgagcttgggtgaggaactggccaaagggctcgggcagtacacatcgcttgtgaaagtaatcggaatgtttgtcgttgtcctcttgacgggggcttcagtctcagtcgccggagccatttcttttatcggcttggtgattccgcatatcacccgatttttagtcggggtagattacaggtggatcattccctgttcggcggtattcggcgccgttctgttagtcttcagtgatattgccgcaagactcgtcaatgcgccgtttgaaacaccggtcggcgctttaaccgcccttatcggcgttccctttttcttttatttggcgcgcagggaaaggagagggctgtaatgaatgtaaaatcgaaaaaaccgctggcggtcatggccgttacgtttgtgctcatatgcatcgtcttttttatcagcttaaacatgggtgtgatccggattgcgccacttgatacgatgcgtgtctttttcggacagggggatgcccgggatcagctcgttttatttgaattcagactgccgcgcatggtgctgtcattgcttgtcggcgcaggaatcgcggtttcaggcgcgatttttcaaagcgtgtctcaaaatgacttggcggagccgggcattctcggtattaacgccggggcgtctttggcggtcgttctgtttatcttctttttccaagggtcagctgttgatctaagcatggccagtacatggctgcttccggtgagcgctttggcgggggcttttctggctgcgctgctcatctatgtgctggcttggaaaaaaggcgtttcacctgtccggctcgttttggtcgggatcggtgtcaatgcggggtttaatgcgcttctcttgatttttcagctgaaaatggacccgcgggatttcatgcaggcgcttgtatggatttccggttcgatttggaacgccaattggaaaatggtgctgtccattttgccgtggctgctggttcttttaccgttcagcctctataaagccaggtatttaaatgtgctccagctcggtgatcagctggcggcggggcttggcaccaaggttgaaaaggagcggcgcgttctgctgatgtccgccgttgccctgaccgcgtcatgtgttgcggcagccggcggaatcgcttttctcggactcattgcgccgcatttggccagaaggcttaccgggccgcgccaccagacgcttatcccggtttcagctttgatcggagcatttttatttctgcttgccgatacgctggcgagaaatgtgcttgcaccgtccgaagttcccgtcggcctggtgatttccgtgctcggagcgccgtattttgtatatttgctgatgaaaacgaaatagaggaaggagactgccgcgatgaactcattatcggcggaacagcttactgtcggttatggcgaccgtttgatagcgaaagaattggatatcgccatcccgaaaggaaaaattacaacgctgatcggtccgaacggctgcggaaaatcgacggttctcaaaacgatgtcaagaatcatgaaaccgaaatccggcgccgtctatttaaacggacaggcgatcatgcaaaaatccacgaaggacatcgccaaggaaatggcaattcttccgcagacgcctgaagcgccgagcgggctgacggtgtacgaacttgtttcttacggcaggtttccgcatcagtccggaatgggccgcttgagtgataaagaccgtgacatgatcaaatgggcgcttgaagagacggggatggccgaattttacgaccggccgatcgaagcgctttccggggggcagcggcagcgtgtgtggatcgccatggcgctcgctcaagaaacggagctgctgcttcttgatgaaccgaccacttatttagatctcgcccatcagcttgaaattttgcagctgctggacaaattaaacaaggagcagggccgcaccattttaatggtcattcatgatctgaaccatgccgcccgtttttcccattacatgatcgcgctgaaaaaagggcgcgtcatcaaggaaggaacggcggaggaagtcatgactcccggtatattggaagacgtgtttcaaattgacgcacagattgtaaaagatccgcgcacgaacaaaccggtctgcttaacctacgatttaatccggcatgaaaacgcaactgtaagatgaaaaaaaacgcagagccattccggcctgcgtttttttagtgcgcccggggctgcttttgtccggagacgcatttatccaaaacgaaaaaaacccccgccacaatcagctcctccgtcgttgacagccaaatcttttcaatcagtttatccgtcgtatacgcagtcatccagaggaacagcagctgaacggtgccggctaaaaggagaaaaggcagcctgcccgtcccaaaaaaggtaaagctatgtatcatcagccgttcaagcggttcaaaacataaaccgagaagaataaaaagcacggaaaaaagcaggacgtacgccatcgatccgtagctcgtcccggctaatgaaaatacggccatcatcacgatgaaatacccgaataatacggcagcggctgccagggcataccggagcacctgaagaaaaaacattttcgtcccgttttgattgatcatctgttcagctccttttcacacagaggagacttgcagagacggaactctgcaagtcgggtgtgtatcttcagcatttctttttgacgacagggtgtttctctttcgaaagaatatccgtaaagtctttgcccagatccagatgctgctggacgaatttctcaggaagcatggcaagccattggttcagggacacatcggcatagtggtcatccttgaagatttccaggaagacgagcggctcatcccccaaattctccacatagtggcccattgcgaacgggacgtaaccgacatccccggcctgatagttaaatgttcttgcatggccgtccgatgcaaaaaccgtcatccgtcctttaccggaaatataatactgccattcatgcgtattcggatgccagtgcagctctctcattgcgcccggttcgaccacgacaagcgctgaagcgatcgttttggacactttgaagtttgtggaatccgcgatatatactttgccgccttccgtctcagcagtcggaccttcatcgagcaggcggtaagtgaacggataaggcacttcgccgttcgggccttccacaatgtcgtctttcagcttcccgggaaccggctcttcaaagatgtatttttctttccgaggcaggccggcgaggtctttttctgaaaccccgaaattgttggcgatgacatcaagcggcgtgtgggcaagccagtcagtcacttggaatgtgctgttttctgagaaggaaccgtcatcaaaaaccaagaggaattcacagccttctttcagcgcctgaatggagtgcggcaggcctgacgggaagtaccacagatctccttccttcacgtcatcgataaaactgcgtccctgttcatcaacgatcgtgacccgcgctttgcccgtcagcatatatgcccattcggcttctttatgccagtgcagttcacggatggcgcccggttttaaacgcatgttgacagatgccagattttcagaaatcggcagctcgcgaacggtcacctcacgcgcgtacccgcccttttccagccggttatgcacatctgagaaagagaatttcatattatccactgtgccgtgatccgtttccggcggcgtcagcatatccggattttggcggtctctttcaagattgcgcggaatcgtgacggtcgctcctttgtctcctctgatcggctgcgggatattgcagttgttttcttttgacatgtaaatcgtctcctctcaagctttgttttttcagaaagagaatgtgaaaggcctttcgttttcccttctgctttgttaagtgatgcgttccgatgaaaagtcaacttcgtgtgaaaattaatttttcattttctgatctttcagttccgtcatcagttcgatcagggcgtcaaacttcttctcaaaccgtgtgagaagatacatagcaatcagagccggaaagccgagattgccgatctgtctgaccgcttcttctataaaaacctgatccattgtcagccacctcctgacttgacctgcagtcatgtatataagtgaaagaaagagcggctcctgtaaacctgatatcccggttgagggtctttttttttgttccggcaaatccgggacataaggaatgcggaatcttagtcggaaaggagtagtttacttttttttgctttctttcatttaatttaaatagggggcggttttatggactatcaagttcttttacggtcaaaatgcaaggaaattatgaaacatccgatcgttaaacattttttaagtgacccaaagcattacgagaaatttaaaaatgtgctggaacattcagacgagaaggatgcaaaatcattggacgaccattttaaacagttttataaggaaatccggatcatcaaatatatgaactctatgatccggattttctccatcgattttgacaagcgcatccgtaaaaatcagaatcgctatccgctgacggtggatcagccggagggaggtgaagcgcttccctatgaaatgggaaaagacgcgtatgaagagtttctgcggaagcagggagatttgagccagcatgtccaaaaccgtgatttatacgaagcgcttcagacgttaaccgataaacaaaaaagcgtgctgacgaatatttatcttcacggagcgacgatgaaagagattgccgagtcgctgggtgaatcacggcagaacatttccaatattcataaaaaagggctcgacaatctcagaaagcagctggacaagcaaaaaaagggggaaaataagcagtgaacgggccatttgacttcaacaaagagaacacagataccgacgaaatggaacttttgatttcacgtttttcgccaatgataaaaaaaaaactgagcaatacatcataccaggaaagagaagaccttgaacaagaattgaagattaaaatagttgaaaaagcggacatgctgttatgccaggaagtgccgggtttttgggaatttattcttcatcttataaatgaaagctcctgacaaaagcggcggaatgatggatattccgctctgacaacgtgagaaaaacgagaagagatgtccgtctcgtttttcttttctgtttccccgcaagacctccgcactaaaaaggtaccaaatcttatccatataatgatatgatgaaaaaaacaaagagaaaggaacgtccaaggtggaaaatgcgtcaattttaattgtagacgatgagaaggcgatcgttgatatggtcaaacgcgttctcgtcaaagaaggctatcacaacattaagacagccggaagcgctgaggaagcgattgagtttgttaaacatgaaaccgcggatctgctcgtgctggatgtgatgatggaaggcatgtccggttttgaagcatgcaccgaaatccggaattataccgacgctccgatcttttttctgactgcccgttcttctgatgcggataagctgtcaggatttgcattgggagctgacgattatataacaaagccgtttaatccgctcgaattggcggcgcggatcagagcgacgttaaaaagaacctataagcgcgaagagaaaacggcggtaaaaacgtattcatacagccatttttcctattcgccgcaaaacgccgagctgatcgtcgggggcgagcccgtcagctgctccgcacagcttctgcaattgcttcaatatttctgtgaacaccctgatgtggtgctctcaaaagatcagatctatgaaaaagtgtggggatatccgtcttacggcgataacaacaccgtcatggtgcatatccgcaagctcagagaaaagattgaaaaagaccccagcaatccgtcttatattgtaacggtgcgcggcctcggctatcggtttattcccgatcaaggagaaaaaggaatccgctcatgagaatgcgcggaaaatttctgctccactttttcggacagcttctgcttgtcatcctgctgatgtccgttttggccgtcgcttctttcttctatttggattggcgtttcagcgaagcggaagccaatgcgggactgaccaaagcgacggcagactcgtttgaagcgtggcttgataaaaacgaagacggcacatgggatgtcgatgaatttttaaagatgtcggtcagaaagcagaagggctggctgcagatcattaatgacaaagaaaaaacggactacgcatacagagtgccgaaagacgtcccgagccattacagcagaaaagacctcttatccatttaccagtaccggaattttgacaactacaagctgaattactggacggtcacgataaatgatgagacctatttgattctgttcggctggaaatccgccagtgagcagcttctcacttacatcgaatcacaggagccatccctcgcttccctttctcaatataaaaaaagcacggttgattatattaaacgggaaaaaggggcggtctaccttctcgaaaacagcggcagactgctcggggatatcaacagcacgaaaaaagaacggaacaccgtcaatgagcttgaattgctgaaatacagttccaagccgtggaattacaaacgggaaatttcttttaaaagactcgataaaacgaaatggatggtcgcgtcggtgccgaaccccgtgtacatccccgatcacgagtttaacaaatcatttttgagaaatgtgatgaaaaccctcttcctcttgatcggaatcttagtatttatgatctgcatcctgaccatctggtactctttccgtttcggctggccgctgtttcataccatcaaatggcttgtcaatttatcaaagggccggcttgaagagccgaagaaccgcaaaggacagccggtcagcaaaaacaaaaaaggcaaaacaaaacagccgttccgctttttcgccgagattttcgaatcgatggatcagctgaccgacacgctgaagcgggataagaaaaacagagaaaaaatccaggcgacaagggaagaatggatcgccgggctgagccatgacttaaaaaccccgctgagcacgatttacggctacagcatgatgcttgaatcgaagcaatacgactggacaccggaagaagtcaaagaaatggggcagatcgtccgggaaaaatcagaatatatgtctaagctgattgaggacttaaacttaacataccgcctcaaaaacgcggccctcccgatcgaacggcggctgatcaacgtcgtgccgtttatcagaaacgtcacgaacgattttacgaaaaacacgttctcggaaggctatgacatcgcctttgaaaccaaaaaggaagacattcttttcgccattgatgaagcgtggttccgccgtattctggagaatctgctggcaaacgcggttaagcataataagaaggggaccgccattcgggtggtgcttgaggaatcagccgaacagctcattctgaaggtgaaagataacggaagaggaatggacgatgaaacgattcaccagctgtttaaccgttattaccggggaacgaatacgaaggggccgtcagaaggaacgggactcgggctcgccattgccaaagagctggttcaccttcataacggaaccatccatgtcaacagcagaatcagcgccggaacggtgattacgattctttttaaaaaagattgagtttggacgccgctttgtcgggaataacaatagaagactgacaagcaaaagaggtgttcacacatggaagcagcattacgagcagatacgagagcagttatcggagaaggccctttatgggacaaggataaggaatgcctgtactgggtggatatactgggcagccagctccatatcttcactccggctgacggaatcaaccgttccgttaaattcaactcatttgtcacggctctggccttgtattcaaaggaagagctggtgatgacgatgaaagacgggttttacctgtacaatctgcgggaagacacattgacgaagatgaagcagccgaaagacatgcgggaagatatccgtttcaatgacgcaaaatgcgacccgtccggcagattatgggcgggaacgacgagcatggaaggcaaagaagaggaggcttcgctgtaccgtctgaatacggacggcagccttgccaaaataaaagaccaggtctccacctcgaacggtttggattgggatcgggaccgaaacctgatgtactatattgatactccgacgcaggaaatcgtctgttatgcatatgatcctgaaaccggagccgtatcagatccgaaaacggtctaccgctttccggagtcgcaaggatctcccgacggaatgaccattgaccgtgacggaatgctgtgggtggctctgttcggaggcggccgcgccgtccggattgacccgtttttgcataaggaaattgcatctatcgaagttccggcgaaatacgtcacctgctgcgcgttcggaggcagcaatttgaacacgttatacattacgaccgcgacggaaaaattgacggaagccgaaagacttgagcagccgcatgcgggcggcctgttttcagcagagcttgagacgggcggctgggagccggttccgtttgcaggcatgatgtaaaaaaaagccctggcatatggggaagttccccttgtgccgggcttttttgtgttaaatggagcggatgatgccgccttcaacccgctgtgcggtgccgttaatggcagaagcagctgatgaagcgagaaatacaatcgtattggcgacttcttccggggttgcatagcgctgaatcaaagatgtcggttcattcactttaaaataatcccggacgaagctgtccgtgtcttctccggcagcctttgcggctccttccatgtaagaagcgacgccttcggtccatgtcggtcccggcagcacggagttgaccgtgacattcgtgcctttcgtcatttccgccattccccgggacaagctgattaacgccgttttcgtcattgaatacggaatcatttgcgcaagcggtttgactccggcttcactggagatgttcaaaatccgtccgctgtttctttcaagcatttgcggcagaaaacgccggcacaggcgcacggcgctcataacattcacttcaaaataccgagtccattcgtcatcagacacctcagcgaagtcctttacttcaaaaaaaccgagattattgacgagaatatcgacttccccgattccgccggcgcgcttgatcaggtcatccgcctcatcctgacgcgataaatccgcagcgatgccgtgaaccgttccgtaagcggaaagctcctcaaccgtccgttccacggtttctttttttcttccgtttacaatcacctcggcgccttcggctaaaaagctttttgccgcggcttttccgatccctgaagttgatcctgtaatcaatacgagctttcgttcaagctgtaattccatgataatcctccttattacaccattgtgtaacagtatacatgatgaattttagtgtgtacgaacaatttgctttcatgcaaaaaggccggatatacaagccttaaagacttatagtataattactgcgaaaaaaggatacgaatgtcaaagagacaatcgtttaccataatcagggggagttaaaagaatgaagaagatcactgccgtctgggcggcgctcttggtcaccgcctttgtgatcgccggctgttccggcgcacaggaagaaggaagcgcggccaaacaaaaagccgtctcaaccgaagcattcccggtaaccattaaggatgccgcgaacgaaaaagtaaccataaagcaggcaccggaaaaaatcgtttccctcatgccgagcaatacggaaattacatacgcgctcggactgggagataaggtcgcaggcgtcacgacaaatgatacatatccgaaagaagccgtaaaaaaaccgaaagtcggagatatgaatgtgaacgctgaaaaagtcatcgcgctgaagccggatctcgtgcttgcccacgcgtcctctatgtccgcttccgccgatgcgatgaagcagctgaaagatgcgggcatcaccgtcttaacggtcaatgatgcgcaatcgttccaagatgtgtacaaatcaatcagcatgatcggaaaagcggccggcaaagaaaagcaggcggatcagctgatccaatcgatgaaatccgacctttccggcatagaaaagaaagcggcggccatttctgaaaaagacgaaaagaaagtattcgtcgaagtgtctcctgacggctacacgacggggaaagacacgtttatgaacgaaatgcttgaagatatacatgcgaaaaacgccgccggcagccagaccggctgggtgcagctgacggatgaagcgattgtcaaaatgaatccggacgttatcatcacgacagacggcgtaaaggccgctgaagtggaaaaacgcgccggctggggtgccgtcaatgcggtcaaacaccacaatgtctattctgttgatcctgaccttgtcacacgctcaggcccgcgccttgtcaaaggggtcgagaagcttgcagaaagcgtttatcctgaaacgtttaaaaagtaaccgcccgctggcctacacggtcagcctgctgtttttagccgtttgtacggcactcggcatttcaatcggcagtctgcatattcctttatccgacgttttttggatcgggatcggccggacatcctctgttgatcccatgaatgtaaatattatgatcaatatccgcctgccgagagtcgttctggccgctcttgtcggagccgcgctatccattgcgggggcggcgtttcagggacttctgaaaaatccgctcgccgacccttatacactcggggtatcttcgggagcctcggcgggagccgttatcaccttgtttttcggcattcagattcccgtcatcggccggttcacacttccggttgtcagcatcgccgctgccattgcggttatggcggcggttctgtttttcagccgcctcgttcatgcgtcgatgtcggtttcgacgctcattttgacaggcatcattatgaattcttttctcggggctctcatttcgcttgtgattgctttaacgggaaatgatctgctcccgattgtccgctggctgttgggaagcgtgtcaatgaggggctggggctatgtcgcgctgtttctgcctttttttctggccgggacggcgcttctgcttatcaatggcagagaattaaacattatgacttatggagaagaaaaggcaaagctgttaggcgtcagtacgggaaaaagaaaactgctgatgatcgccgccggatctctgttgacgggaggagcggttgccgtctcggggacgatcgggtttgtcggccttgtcattccccacgtgacacggcttttgtggggacggatcatcgccatttactgccgctgtcagcattgacgggcgccgggtttctcattttggcggatttgttttcccgcaccgttattgagcctgtcgaattgccgatcggcattatgacggctttggcgggagcgcctgtgtttgccttgattctgcttcgccagcatcatggagggaaacgcttatgatcagggtgagcagcctgtccggcgggtacggaggccggatgattgtagaagatgtcagttttaccgccggaaaaggtgaatttgtcggcatactcggtccgaacggctcgggaaaaacaacgctgatgaaattgctgacgggaatgctctctccgtcaaagggcgaggtgctcgtcgcaggcaggcccgcgggcagatacaagccgcgggagcttgcgaaaattatggccgttttgccgcagcatacggagcaagcttttacatttaccgttaaggaaacggtgtccttcggcagatacccgtatcaaaaaggactcttcagacagatggatcaacatgacgaagacattgtccgggaagcaatggaaatgacgggcatcgaccgatatgcacagcaatccgtccgcaatctgagcggaggggagcggcagcgcgtctatctggcgcaggcgctggctcagcagcctgaggtgctgtgtctggatgagccgacgacctttcttgatctcaaatatcaaaaagacctgcttgatacggtgaagcggctgacgagagaaagaggcctgacggtcatcagtatttttcacgacctcaacgtcgcaagccaatattgtgatcagctcctgatgatgaaagacggacgcgcttttccgaagcagccaccggatcaggctttgaaaaaagagacgattgaagacatttacggcattaccgtcagcgctgttgcccggcaatcgtcgccgaaaccgctgatcgctttcatgccggaagcgcgggaggaaagagagcccgccggcgttccgttcgcctctctgataaacaaaagcggaaataccgtaacgcttcatacagaacggccgtttagaatgctgtcaaccgcatctgacggcccgggcttttcgtggagccgccggctttccggctcggcggcagctggtttgatctgccgtacgtttgattcggttacgatagccgtgactgcgcagtataccgtttgggtgctgatcagcggacgtttatcggaacagggatttgttcggctgttaacggcagcggctgaagcgagaatgcaggctctttccggcagactggcaaaaggcgacattgccatttgtgccttgcagacaggagaggcaatggacgtccctcacgcggaaagagccgtcagaagaggaaccgcggtatgtgtaaaagcggcggaagaaggaggaatacaacaatgaagctttatacgaaaaccggcgataaaggacagacaagcctgatcggcggcagaacggataaagacagtctgcgggttgaaagctacgggacgatcgatgagctgaacagctttatcgggcttgcgcttgcggagctagataattgtgagaattgcggtgatgtgaaagccgaactccgaaacattcagcatgagctgtttgactgcggcggcgacttggcgacggtcactgaacatagaagctatacattaagagagacatctatttccgcattggaagactgcatagaccgttacacggctgaagcgcccccgcttgagaaatttattcttccgggcgggcataaggcggctgctcagcttcatatcgcgcggaccgtcacaagacgggctgagcgtctcgtcgtgaaactgggcaaaacagaagagataaacgatacggtgatgcgttacttgaaccgcctgtctgattattttttcgcggcggcaagagcagttaacgcaagacagggcgttcaggatatagagtatgaaagaagcgccgcggtattccgtgatgatgaataacgttttgttcagccggcagcagcaagccggctgtttttttatagagatatccatcaattgaacctttattgacagaaggaaaatgtatcttatgcattattgactgaaaaattaaaaaatgagatattataagaaacattgtaaaataatgggggatttgatagatggatacatataataagagcgagagcatctggaataaaaatttcacccttctgtttatctcgaggcttgttaaattgtcaggcgacggttttgcctttaattccattctgtggtttttgatttttgacggggaaggcgcgatcggcacgtccctgctcattgcggtcacgttccttccggaggcgatgctggcgccgattaccgggccttttatgaagcagcatacgctgaaattctggatgtatttctccgatctcacgcgcgcggcggtcgtgttgatcattccggtctgttactttaacggtttttctcctttatggtttgtcatgcttctcatgattttgcattcagccacgggagccgcttataatcctgcatctatctcattaatccccaatattgtcggagaaaacagcctgcagaaagcgaatgcggtcatccagtcatcaggccagatcgtcagacttgccgccattacgctgagcggggtgttcttaacatttatcagtcccgcttattctttgtttatcgctcttatattctatcttctatcaggttttctcgtactctttatgtcataccaagtccagcatgccaaagaggataccgtcgccgtcagacagcgcgggacgtatgtcggaaggctcaaacggggtttcgttcttgtcaggaaacaccagattttatacccgctcgccatctattgtatcttcatgaattttgcggccgctccgtgggaggcgctctctgccgtttatgtcgccgaagatttaaacatgccgccgatcatctactcgcttttgaaagcgacaggcacgggcggagcctttttaatgggttttattttggctaaggtgaaggtgaacaaatacggtctcctgtttgtgtcagcgggaatcatagaaggggcggcatttttcatcaccggcctcaacacttttctgccgctcgtcttcctcgccgcgtttgcgttcggatctgccgtcagcgcgattaatgtgccggaatatacgattattcagacgtctgtggaccatgatgatcagccgcaagtctatgccgtcatccatatgatctcaaacatatccattccgctcggcgcggttctttgcggatacgcggctaacgccttcggtcccggaaaagtcattgccgccggcggtctcgttgaagtcctgtccggtctcggaatattgctctttacgaagctggccaaagctgaacgctcagatctcatcagggaaaaagaagcgagcatcagaatatagatttttcgtgaaacgccctgcgccgtccggtgcagcggcgtttttttatgcgaaggtccgggggttatacgactccggtctgatatgaaaatcaatctctgactcgttttgccggccgcgggatttgtttatagtaaagacaaggaaaacgaaaggaggatctgcatgaatataaatgtaaaaacggcaggcggctttctgctgattgtgttcggactttctgtctttttcggaggaggccatttcgcatttatcatcccgctggcgatcggaggcctgatgctttactggggaatcaaacgtttttcaaaaggccgggcggtatcgggtatcatcgcgggcttcatcggagctatgattctcgtcggttctcttccatttatcgttgccatcggactggctggcgccatggtgtatttcgggtggaagatgatgaagcagggcggctcagacaccgcttcccgccagtatgaaccggaagcggcatcaccgggctatcaatccggatttgactctgaatgggaagaatttctgaagaaaaaataaggaggaagacaaaatggtcttaaaaagaataagaaatatgttcgtcgcatctgttaacgaagggcttgataaattagaaaatccgaaagtcatgctgaatcaatatgtgcgtgatatggaaagtgacattgctaaggcgaaacaaacgattgtcaaacagcacacgatcgtccatcagtttaagaaaaaacaggaagacgcttccgaaacggcggcaaaacggaaaaaccaggctcagcttgcttttgacgccggggaagaggagcttgcgaaaaaggcgctgactgaaatgaaataccttgagggaaaagcggccgaacatgaaaaagcgtatgagcaggcgaaaacacagctggcagagctgaaagagcagctggaaactttagaaacgcgcctccgcgacgtaaaggataaaaaacaggcgctcatcgcccgcgccaacgcggcaaaagcgaaggaacatatgaacgcttctttcgacaaaattgacagtgaaagcgcctacagagagtttcttcgaatggaaagccgcattgaagaaatggaagtccgcgtcaaatacggcacttcagctgaggcgaacacagaatacagccgctcccaatattcagacgaggtggaagctgagattgaaaaaatgcgctcgctttctctggagaaaacagagcatcaaaaagcggctcatgaataatgtgcacaagggaagatcggcgcttttacgcctcttccctatacgcacgtatcaattctccggcttttcctttataataaaatgaatgaaaaaggatggaacgtaatgaagcgtaagatggccaaaggactgatggcggcgtccgttctgatctgctgtctgtttttggtgaaagaagtgtttgccgggcgtttttttccgctgtacgaaacagaagcggaatcggcaagcataccgccgcgtgccgtcaacagcctgtcggtttcatcggaacagacggatgtaaaaatcatcgcggaagcgcggaatgatatcgcggcaaacatggcgggaccggcggggaaaatgtttgtccaaagcaggggaaaaaccctcaatctcaaagcgaaggagaaagggttccaatttctgaatctctttcagcgtcctctgctgattgtccgcattccgtatgattatcatcgggacattaccgtccatacgtcaagcggcaccattgccgttgacggaaacaaggggctgtctcttgcgcacctcggcgtccgttctgtaagcgggaatatgtcgctgaagcacgtgaagacggatgtgtttgaagcgaaagggctgtcgggcaacctcacagcatcaggccttgcggcgaaaacgggggatatccgcttatcctccggacatgtcgggcttcaacatgcggcgggcgcccttgacgtgcgggtcgcttccggcagtgtcgacgcctcgcttgagatggcggatgctcccgtatccgtcaggcttgcgagcggcagcgcagcgatcagcctgccgaaagacggaagttttacggtgaacgccgagacggcaagcggaaggattcagccgtcttattcctttgagaaaacgagtaaggacggcggggcattcaccggtatgaagggcagcggcgccaggccgattgatataaaagtgacgagcggcaatattgcactgcaatagtcaaggaaaggaggggcaggcagctgatggcaaaaaaacagattctcggacttatcatcgccttattaggcgtcagcatgtttttgcgtattatcggcatcggcgacttcttgttttggccgctcttttttctgatcacaggctatatttttaataaatattcccgcggctggctcggctccgtcctgtatatcttcgccgcttttttatttttgaggaacctgttcagcgccacctttaacctgttcggctatgccttcgccgcctttctcatatacgcgggctacaggctcctgaaaggaaagcgcgtgtatgaacataaagagaagaaaatcaatcttgaaaaagaagagcagccaaagccttccgcccagacggaaagcagacagccggacctccgcagcttttttatcggcgagctccggatgatgaaggacccgtttgagctgaatgatttaaatgtttccggattcatcggcgatgtgaaaattgatttgtcaaaagcgatgattcccgaaggagaaagcacgatgaccatcagcggtgtcatcggcaatgtcgatgtgtacgtcccgccggatatcgaagtgtccgtcagttcatcggcttttatcggcgatatgaacctgctcggctctaagaaaagcggcatgagcccgaatctttataaagtatcgtctgagtacggcgactcgccgcggcggattaaaatttcaatttctttattcatcggcgatgtggatgtgaagtatttatgaggaaaaaattactcgccaatattcagtggcgcgccatgcggatgactgcggggctcagtctgctcctttgtgcggtgtttattacgctgatgctgctgtattacgggcttgacccgatgctgctgttttcttccggctggttcggtattccgtttgtggtcatcctgcttctggcgtctctttcggccggattgatttccggttatgtatacggcggccgcctgaaaacaagaatggatacactgattgaagcggttttgaaatttgaaaacggcaatttcgcttatcgggtgccgccgctcggcgatgatgaaatcggcctggcggcagatcagcttaacgaaatggccaagcgggtcgagctccaggtcacatcgctgcaaaaactctccaacgagcgggcggaatggcaggatcaaatgaaaaaatcggtcatcactgaagaacgccagcggctggcgcgcgatctgcacgatgccgtcagccagcagctctttgccatttctatgatgacatccgccgtcttagagcaggtgaaagatgcggatgacaaaatcgtcaaacggattcgcatggttgaacatatggcgggggaagcgcaaaacgagatgagagcgctgctattgcatctgcggcccgtcactttagaaggaaaaggcttaaaagaagggctgattgagctgttaaaagagttcaaagcgaagcagccgctggatattgagtgggacatcagcgatacgggtgtgtcaaaaggtgttgaagaccatctgttccgcatcgtgcaggaggcgctttccaacgttttcagacattcaaaggcgaccaaggtcaccgtcaggctcggcgcgaaacatcaaaagctgcagcttaaagtcattgataacggggagggttttacgatggatcaagtgaaagcatcctcatacggcctgcattccatcaaggaaagagcgagtgaaatcggcggcatagcggaaattatctccgtgaagggaaaaggcacgcagatcgacgtgaaagtcccgatttatcagaaaacaaaaggagagaacgacagtgattcgagtgttactgattgatgatcatgagatggtcaggatgggtctggccgcatttttagaagcacagccggacattgaagtcgccggtgaagcatcagacgggcagcagggcgtcgatctggccgcagagcttttgccggatgtgattttaatggaccttgtcatggacggcatggacggcatcgaagcgacaaaacagatctgcgcgaaactcaatgacccgaaaatcatcgtgctgacgagctttattgatgacgacaaagtgtatccggtgatcgaagcgggagcgctcagctatttgctgaaaacgtccaaggcggcagaaatagcagaagccatcagagcggctgccaagggtgaaccgaagcttgagtcgaaagtggcgggaaaagtgctgtcaaggctgcgccattcagagaatcagcttccgcatgaaacgctgacgaaaagagaactggaaatcctctgtctcgtcgcggaaggcaagacgaataaagagattggtgaagagttgttcattacgattaaaacggtgaaaacccacattacgaatatattgtcaaagcttgatgtcagtgaccgcacgcaggcagccgtatatgcccaccgcaatcatctcgtgacataaaaaaaggagagcggcgccggcacactctcccgagggacggggtcattgggacattccctttgttccgaaatccctgatggcgactttgactttgtattcaatatccgattcactgaagtgatgatcccagtcagaggatatctttttccatttatcaggataatgaatccggacttgatcgcctaacccggtaatatccactttcaactcatgctgcatgtaatcaatgaatgccataacatctgaatgaatgctgcgttttaccgcgtttttgatttcatttatataggactccttgaaagaatcttctttcggattccaatcctcagacagacggccttcaacaaaccgggtgacgataaacttgaattttccgtttttatattgtgtttttacattatatttgctggaaaatacctcgaaagataaataataattgtcatgctttgcaaacgtgacgcctccctttaccgtgcctgtgaacaggttcatattctggacttgtaaaggcgttaaatttgcataccagaatttatttttaataatggtagcgccccagatttccagtctgctgcccactttgcgcacttgaggaagggcaaaggtttcgcccttggcgattttctctgatatttcccccaatgtcacgggctccatcatccggatggtgaccgaattattctccgttaagtcatagatcgtatttgacgcaggttctccctggtcactgatattgaaaatatctttcgttttatccggcaccgtcatcacattgcagcttcttctcgtaccgttgtctctgataaattggttcatcaatgcgtcaagcggaatgtcatcctttaacagcgcttcggaaaacagcatgatacgcaagtgctgggagaaggcggggtgattttttaacgatgccgttcttaatgcttgatggacggtttcccctggagtggaagtcacctttgtcgtgtcacctgacgacgactgctgggcacttgctttttgcggaaccagaatctgctgtgtcacttccacattttcttccgcgggtttatctagcccgactccgataacgaggctcaagtcttctaaattgcggctgtcccagcacccggccaaaagcaatgtgcaaaatatgattacgatgtatttcttcattgtgcttttttcaccttccttttcacagcgacgactgcaaacatcagtaaaggcagcaaaaagaaaaccaagaagatatagccgagaatatcactgaacagcatcagcttgtttccgtcttttggcaacaatgatccgaagaatgtcgcgatgcctacgaagatgatgccttttttctgtttcagcccgaaaattttatgaagagctgatgtcgcgaaatatccgtatgatacataggtggcgaaaaactggatgatccagacaacaagcaaaaaggactcgaacctttcaataaaaagccctttgatttcaaatgattgaaagagcgcgatcgttggccagatcattgttttgacatcctgggtggttaaggcgccgacgacgagaacgtaggtaatgatgtataaaataatcgggatgccaaagcctatggccgacatgcggaatgtgtgctttttatttttgaggtactcggggagaaacagcataatctcaattcccaagaaggaaacagaaacgacggtcaaggaagccataacgggagaaaatccctgcccgagcaccggccgcaggttgtccagatcaaatattttaaagctgaaagaaaacaccaccagcaaaataatgatcgtaatcgttaaatagaaaggaaagagcctgccgatatcgctcatgccgccgataattaaataaacggaacaggcgataaagataaacagtgtgaccggcacgggcgttctttccaataaaaagaacttgaccatttccgccatcgcccgggcttcgaagctggcgactcctataaaatagagacagatcatcagattgacgatatttcccgcccatttgccgagtccttcattcatataatcaaataatgatccgtactgatgctttttcataatgagcgtattgagataaatcaaaaagataaagatgacgccttccagacataacgcgatccagccgtccggcgaatttgccctggatgacagcgcccgcggcatggtgaggagccccgcgccgagcatcgtgtttgcaatcaatgctgtcccttgatagcttgtaagcttattgtgagttgttttctggctcatttacgtttttcgcctcttttggttgatttttaatagggagacggagaatagagtcgtttgcgttttttaagctgaaaaatccattcggcgagaaatacggagaaccgaagcttcgctgtctcgataaatgagtgtagatcgccagcataaataaaatcatgccgtacagcccgaaagctgccgcggtaaacatcgaaataaaacggagcacacggaacgacagacccatcccgtactgcggcaccgtaaatgaagcgagcgcgacaatgctgaccacgatgaccatgatggagctgacaatattcgcttcaacggccgcctggccgatgacgactccgcccaccaatccgatcgtctggccgagcgggctgggaagcctcaagcccgcttccctcagcagctcgattgtaatttccattaccatcgcttcaatgataggcgggaaggggacgttttctctgttcgccgcgatggtgactgcaagcgacgtcggcagcagcccttggtgaaacgaaacgagggcgatataaatggacgaaaaaaacagcgtgataaaaatagacgtaaacctgagcgcccggatgagcgaggcggaaatccaccgttcataataatcatcgggagactgcattaaaattcctaaagaagccggaaccaccagcgcaaacggcgagttgtcgacaaggatggcgacgcggccgttgaacaaggcggaagagactttatcaggccgttccgtattttgtatttgcggaaagggcgaatacttattatcctcaataagctcctcaagcgttccggaatcctggatgtcatccatcttcactttgctgaggcgctttacaacatcgctgacgacagacgggtccgccttatcatctatgtacatgaccgtggcgtattttaacttattttctccgatcggaacctttttcgttttcagcttcggatggttcgtgcgctgcctgatcatggcgatgtttgtatcagaatcttctatgaaggcgattttcggacctcttacgaccttttcggatgtgggttcatttacgcttcttttttctctttttcccgtggacaaaatgtatacgctgtcaagtccgttaataaacacggcgcattttccccgcagaatggagatgacggcttccttcgacgtaaagacgggacgggcgttgatcttatcaagacgtttcgccaccgtatccagcgtcagagtgtcttcctcctgaagcagcgtttcaatcgcctcttttattttgtcttcgtcgttcatttcactcagatacatataataaaaaacaagcccgttcggaagcatctttttattttgaaccaggtcatcattctgctctacgtggggaagcaccagtgccagattaacgtgtatgtattccttgaactccgattgcgtcatcgacagtcacccgccttccaatccttaattgaggttatcttttcctgttaaaaaaatgatatactatgataaagtatttaatggtacaagtttttttatgaaagcggaggagagatgtggcacaagtcagactggcaggaaatgccgaagaaattgaacagctcatcaaatcatttgaagcgcattacgaagtggcttacacgtcgaaagaataccgtaaaacaaatccgaagtataaatactctaaggattcgcgcgtctatcttgagctgaaattaaaaacggccaaggccgaaaaataaaaagggtttcatctgttactggcgaataatactcagggtgaagcaactgttatggagggatacataaatggactacagaattgaaaaagacaccatgggagaagttaaagttccggcagataaattttggggcgctcagacacagcgcagcaaagagaacttcaaaatcggttcagaaaaaatgcctcagcgtgttgtgaaggcgtttgcaatattgaaaagaagcacagcgatcgccaacgaacgcctcggcaacttagagtctgaaaaagcccaggcgattgccgctgtatgtgacgatgttttaaacggcaaatacgacgataactttccgctcgttgtctggcagacgggaagcggcacgcaaagcaacatgaacatgaatgaagtggtggccaaccgcgcgactgctttattgaaagaaaaaaattccgagctgaagattcatccgaatgatgacgttaaccgcagccaaagctcaaacgatacattcccgacggcgatgcacgttgcggcggttcttgccgtatatgagcagctcgttccggcgcttgatcagctgcgcgcgacgcttgatgaaaaagcgaaagcttatcaggatattgtgaaaatcggacgcacgcatttgcaggacgccactccgctgacgctcggacaggaaatcagcggctgggtatacatgcttgaccgttcgaaagaaatgattcttgagtcaacggaaaaaatccgcgcgcttgccatcggaggcacggcagtcggcacgggaatcaacgcccatccgcagttcggtgaattcgtcgcggaagaaatcacaaaagtaacggggcagacattcaagagttcgcctaacaaattccatgcgctcacaagccatgatgaaatcacttacgttcacggcgcgttaaaagcattggctgccgacctgatgaagattgccaacgatgtcagatggctggccagcggcccgcgctgcggaatcggcgaaatcgtcattcctgaaaatgagccgggaagctctatcatgccgggcaaagtcaacccgacgcaaagtgaggcgctgacaatgatcgccgcgcaagtgatgggaaatgacgcgacaatcgggtttgcggccagccaaggaaacttcgagctgaatgtcttcaaaccggttattatttataacttcctgcagaccgtgcagctgctcagtgacggaatgaattccttccatgacaaatgcgctgtcggtattgagccgaaccaagagacgattcaggaaaatctctctaactcattaatgcttgttacggcgcttaacccgcacatcggttatgaaaacgccgcgaaaatcgccaagcttgcccacaaagaaggcctgacactgaaagaagcggcattacagctgaaccttctgacagaagaacaatttaatgaaatggtgcgtccggaagatatggtgcacccgaaagcataaaagaaagaacggctgcagtcattgcggccgttcttctaaataaactgctgtttcagtaaaaatctgagctgttctgcatcttcagccagcaggtcggattccttcaaattcaaaatcattcctttgatgattgccggtttcggcgactttttcttcatttccgcttccagaatatccaagctctcggtgaattcagatgcttccgccttgtccatcgtgccgatgcgcgtgcggagggtctgcaagatcgattggcttaaaggatcgggctgcccgttatgaaggggcccaaacagtgagcttgcctcatcaagagaaataaatgcttcatcatgtctgcccgccattccgtttacgatgtcatcaattctgtgaatcacggtatttgccaaaagcgaaggctgtacggaccggccggtcagaatgagatattcaagatacatctgactgattccttctattaaaaaacaaagctcggctgtgtatggttcagctttttctccgtaaacagcaagaagactgtcgatatgaaactgcaggatcgaccggcggattctctttccgcactgcgccgcttcttcggtataaggaagtgaaccgtctttcatctgcatggtaataaaatcctgatgggcgagaatcgattcgtaaaacaccgcaagctgtttttgataagcggctctcggactgtcaccctccgtttggatcgtcgtgattcgggtaaacgttttatcatagtagtaattcagcatggataggagcagtgcttctttggaaggaaagtaaagataaaaagcgccttttgagattttgcattcatcggcgatttcctgaaccgatgtagatttgtacccttttcgggcaaacagtttgattgctgcttcaatgatcagcttttctttttccttcaatggttccaccctttcggagccaggaggctggcttgtgcttctcatgtatgactatatggtcatattgatattccgtaaatttaacctgattgtaacttgtttttttgttttgttttatttatattataaagtgagctgaccgaatggtcaaagttctggcgaaagggtgaatctgaaaatgaaagaattagatgaaatgatcagccgcttgcgaaacagaggaattaaagtcgaaaaggtgaaatatccgaaaaagacaatttgtgaaaagaaatgggttcatcaatgccaaaaaccgctgaaagcaaactacagagattttaacggctattccttcacataaaaaaagactgcaatgaaacactacagtctactttggtatgataattcggtagattacacccgattggtcattttcaattgaaattgatgctttatgcagggttaaaatccgttttacgatgctgagtcctatgccgaactcgcctttcttccctttattaaaaggctcgtacaagctggatagcatctcatcctcaatcggaggcccgtcatttttaaccgtcatgacaatctgctgctgattttggctgatccgaatgtgaatcgccgtttctgcatagcggatttgattttcaagaatgttttcaagaagtttgctccattgttccggatcaccgggcatcattaatgcatcttctgtatcaacgctccacaataattccttccgggcccatttgagccgttcaatgacttcttccgtgaccttcacaatgtcaaatgtctcatggtgcacccgctgcttcattaaataatcaagcttcgttaaatataataaatccttaattttcttctcaagtttttctgcttcgccttcaatgacatcaattgtggtttccagatcccccttaggaaaaatcccgtcctttattgattgagtatagccccttatcaccatgacaggcgtttttaaatcatgagagatattttgcaggagcgttctttccgtttcatccttttgcaccagcttgctccgcatgtcttcaatggtatggcctaattttccgatttcgtcttttctgtcgacgatgaccggatcatcccagtcctgttcggaaatccgtttgacatgcttctctaaggaaacgagcgggcgtgagagatatttggcaagccaaatcgccggaatccagcttaacaaaatcacgccggcaatgataaaaagcagctgcttgaacagggtgaatgccagatcatcacgataagaatcaagggcgtaagacagcatcatcgcatcctggccgttaatggtgaggccttttttaatgacgaaaaaaactttttcaccgctgatgtccgcgctgtatcgtttcgtgacgctgtgctggcggcccgcgagcttgtacaccttatggataaaggaagaagaaaaatagttcaagtctttgtcactggccgattcctcccgctccggcagaagaacgtgctgaacggatcggaaagtcgtcggagcggtcgcatcctcgctgtaatatccccgctcgatcgatccgggcagccggtactccgtcagtacatgctgttcattttcaatggtcgtatacgtttcatccgtgaaaaaattacgcagcgtatttgagaacagcacgagaagcagaatcgagatggctaagaggatgcctgagatgaccacccatatttgaaaagcaagcggcttatttttcatgacgtcatcatcctgtagccgaatccgtaaatggtctcaacctttaacccgggcattttttttctcagcctccgcacaaggtcatcgaccacccggtcagtgccgaaataatcatggccccatattttcagcaggatatcttctctggaaaaggggtgtcctttatggtgaagaaataaaagcagcagatcaaattccttagacgtcaaattgaccaggctgccggtttcatcataaacctcccgggcatcttcgatcacattgtaggaagaaacggtgatgccggttttctttgcggcgggctgttctttatacacgagctcgagcagtttctggacccgtataataagctctctcggcaaaaaaggcttggcgatataatcattgcttccaagctctaacccgaggactctgtcaatatcggcatcccgcgcggaaatgaaaatgaccggcacatcgggatctttttcttttatttcttttatcaatgtatagccgtccgtatccggaagcatgatgtcaagaatccacaagtggggagacggctgcatctgctttctggcatcttcgccttttgtgaaagatgtaatgttccagccttcattctctaaatattttgtgagcagttcattcaggttatcctcatcttcaactagataaatggtgtatgacaaggcatttcacatcctttcaacgtcattatactagttttaacatactcaagccgcattttcataatttcacatattcttttcatttttatcccacaatgtttgtttatgatgtgtataagggaagaaaggaagaaaaaaagcggggaagataacatgttcaaacacattttgttttggagctttgcttttctccttattattgggacaatagaacttgtacatgcgatgaatatgtaatcgatagaatgaaaacatgctgaaggagtgtgcgtgaatatgaacgatcatcgagatgacggcagaagccgcgatcagtcagatctttcacatacggaacaaaacagaaatgaacagcagcagatcagccatcaggagcccgagctgcttgaagggaccgtctcgaaagaaccggaaaacgagacggctgccggtacggaatttgaaaaaacggctgccgtgaaaaaagaaaaaaaacggagagccgcttggctgagcccgattttaggcggcattatcggcggaggcctcgtgcttggcattgtgccgaacctgccgggtgagcagcataagacagaagccgtttctgatacgaaacaagttcagtcttcgaattttacgtcaacgcctttgaaaaatacctcaagcgtagcggatatggtggaagaattggagcccgcgattgtcggagtgtccaactaccaagcttcgcaaagcagccagttcggacttgacggcggttcaagctctgaaacggaaagcggcacggggtcaggcgtcatcttcaaaaaagacggcgaaaaagcgtacatcattacaaacaatcatgtcgtagaaggggcgaacaaactgtcggtcactctttacaatgggaaaaccgaaacggcaaagcttgtcggaaaggatgccatcagtgacttggctgtattggaaatcagctcgtccaatgtcaaaaaagcggccagcttcggggattcctccaagctccgcattgccgataaagtgattgccatcggcaacccgctcggccagcagttttccggcaccgtcacacaaggtgtcatcagcgggctgaacagaacggtggacgccgatacatcccaaggcacggtggaaatgaacgtgattcagacggatgcggcgattaaccccggaaacagcggcggcccgttaatcaactcaagcggccaggtcatcgggatcaacagcatgaaagtcagtgaaaacggcgtggagtcgctcggctttgccattccgagcaatgatgtagaaccgatagtcgaccagctgcttgcaaaaggaaaagtcgagcgcccgtttttaggtgtgcagatgattgacatggcgcaagttccggaaacctatcaggaaaacacgctcggactgttcggcgaccagctgtctaagggtgtttacgtaaaagaagtgcaatccggctcaccggctgcgaaagcgggcatcaaatcaaatgacgtcattgtacaactgaacggcaaagatgtcgacagcagcgccgatatcagacagatcttatataaccagctgaaaatcggcgataaaacgactgttcaagtgctcagaagcggaagcaaaaagacgctgaacgtcacattaacgaaacaaactgaaagcgcaagctgagcgcataaaaaaagctgaaccttcaactgaggttcagcttttttcgtcattctcccaagtaggctgacagcatccacacatgcttgtccgcttcttcaactaatccgacaaacaggtcggcagttgacgggtcattttgttcctctgcgatgccgatgacaaattttgattcgcggctgatttgtttatagtcttgaaccagtgatttcaccatttcagaagccgttttttcctgaccttcatccgtaatggaagcttgttcaaggtaagtgtgcaaagtcgccgcaggctgtccgccgatggccagaagacgctctgcgatggcgtccgccgtttccgctgcttcgttatacagttcttcaaatttttcatgaagcgtaaagaagtgagggccttttacataccaatggaagcggtgcagtttagagtaaaggataaaccagtttgataattgtgtgttcattgatttctcaacaagagtttcagtttttttcgcgttttgtgtattcatattcatcgtcctccctgtgatctgttaatttaattatatcacgtatcaaataaaaatcaatactaaattataattattataatttagtttaagtgaacagctttttctttataatcgattcccaagcggaccacggaaagagtgagcggaaagccaatgtcagcttaacgcccctgccgatcggataccgcagtttcttcagccgtttcctttgtgccaattgataaatcagctccgctacgtcatcaggatcgccgcttttggatgcgttggctttgaagtaagcttcaaggggctgataaaagcgataataaggcgagtctttgccgggcgccgtaatatggctggagagagacgtctcccaaatagacgttttataggagcccggttctattaaagcggcatcaattcctaaaggcagaagctcgaggcgcagacactctgtaaacccttcaaccgcgaacttggaagagacatacggagatagagccgggaaaccggtcagtccgctgatactgctgatattgaagattttcgccccgccatgtttccgcatataaggcagcacggtttttgtgacgtgaatcagaccgaatacatttgtttcatactgctgtctgtaatgttccatcagcacatcttcaataaaccctccgtacgcagtgccggcgttattgacaagcagctcaatcggtccgaaaccgctgatggtgttcccgaagtcagacaccgactgctcatttgtcacatctaaagaaacgaccgtaatatatgcggatgcacccgcttgagcggcggcctctttcagtattacagctttctccggctgtctggctgttgcgatgacgtgataagaccgggcgagcttcagcgctgtcagcatcccgaatccgctcgtcgcaccggttacaatggcaacttttctgttcatcttataatcctccccgtttgtcgtttgttcttatctcatagtgtataacatctcgcggaaagaaggagaaatcgttcggaaatatgtcagaattgttttataatggagtcagcttcggatagaaaggggtaaagaaaagatggcattagagggattgaaggaaacatgggatttaaactccatttttgagggcgggagccggtcggaagagtttcagcaatacatacaagagctcaaaaagcatctaagcgcttttcaacatgcggttgaagcatttacagttccgacgcacgcggatgaaagccgggagctgatcaatctgattgataggtttgaacggtcagcgatcatgatcaggcaggcgggagcgttcgtcggctgtcttcaggctcagaacactcatgatcagaaagcgaatgaatggagagcgcggatcaatcagctgagcagtgattttaaatccgctctggtcacccttgacgatacacttgcccggattgacgagcgggtctgggaggagctcctgcaaaaaccggaacttcaggatctcacatatgttttaaatgagagaagagaccgggtcagagagaagctcagcgcttcagaagaaaggctgattgaaggcctggccgttgacggctatcacgcatggggcgacctgtataatgcggctgtcggcagaatgaagattccgtttgaggataaagagctgtcggtcggccaagcggaaaatatgatggcgcacccggatcgccgcatcagacgtcaagtgttcaaagagcttaatgaagcctggaaaggagaagaggagcttttcagcagcacgctgaaccatctggccggcttccgcacggaaatctataaagcgcggggctggaaaagcgctttggaagagccgcttgcgatcaatcggatgaaaaaagaaacgctggatgtcatgtggcaggtcattaccgatcataaaaagccttttgccgaatacctgaatcgaaaggcgtctcttttagggcttgagcggctgaactggtatgatgtgggcgcgccgatcggcgaggcttcgaaagaatacacatatgatgaagcggctaatctgatcgtcagccaattttcgacgtttggcaaaaagctgtccgcattcacggaaaaagcgttccgcgatcggtggatagaagcggaagaccgcagcggcaaacgggtcggcggtttctgcaccagctttcccgacagcggagaatcccggatttttatgacgttttccggaagcgcttcgaacgtatcgacgctggcgcatgagctcggtcacgcgtttcatcaggaggccatgctccaagtgcggcagctgaacagagcctacgctatgaatgtggctgaaacagcctcgacctttgcggaaatgatcgtcgccgacgccgctttgaaacaagcggagacaaaggatgaaaaggtgttcttgcttgaagataaaattcaaagaagcgtagccatgtttatgaatattcatgcgagatttttatttgaaacgcgtttttatgaagagcgcaagcagggcgtcgttccggctgagaaactgaatgaactgatggaagcggcgcagaaagaagcattttgcgattcattaggggaataccaccctcatttctgggcgtcaaaactgcattttcatattacgggagtgccgttctacaatttcccgtacacgttcggttatttattttcgcttggaatatatgcaagagctcttcgggaaaaagcggattttgaagaaaaatatatcgcgcttttgtgtgacacggcttcgatgaccgttgaggatttggcgatgaagcaccttggagcggatctcacggaacggtcgttttgggaagacgcggtccgccttgccgtacaggatgtgcaggaatttttagagctgactgaatgataatctggagatgaaccggccggagctgttaccgctccggttcttttttgttccgtgaatgacagccgcctcccttggaaatacctaaaaacgatcggaatggaatgggagtgaatcgcatgaaatggatcagaacggcgggcgttttatgtcttacgctgatgctgattgccggctgccgattgaatgaagaaaaacgggaagcggaacaagacagcacacctgtgtcatccgagaagccggttccttacagcagcttttccctgcgcgtcagctacggagccggagagcataaccgctatgaaggtttgtatgaaagaaaaagcggtcatgaaaaggcggacatccgggacaagctctcaggggttcacagagagggcgaggaagcgcttgatgaaatgaagatgatcctcggagaacttgccgtaaacggccggatgcaggaaagcgaggtcgtccgggaggtgctttcggcttttaatttggacagccgctatgaccatttttatctaaaactgaaaaagaacgatggagtaatgacggaaataaaaaaataaccgccgcccgctgcttttttacccaaaactaattgataatgatattcagagtcattaatttctgttacaatataatcatgatctcacgttgaatgtttaggcaatttgtttatatacatagtgttgggaaactcaaaaaaggagcggttagcggtatgagtgcaatttctacagagacgctgagcttagggtacggagagactgttatcattgacgaattggatgtcgcgattccaaaaggcgaaatcactgtattgatcggaagcaacggctgcggaaaatcgacgcttttacgttcattggcccggctgatgaaaccgaggggcggttctgtgcttttagaaggaaaagccatcgctaagcttccgacgaaggaagtggcaagagagctcgctattttgccgcagagtccgtcagctcccgaaggcctgacggtgcatcagcttgtgaagcagggaagatacccttatcaaagctggctgaagcaatggtccaaagaggacgaagacgcagtcacaaaagcgctaaaagcgacgaagcttgaggaaatggccgaccgtcctgtggattccttgtcaggcggacagcgccagcgtgcatggattgcgatgacactcgctcaggatacggatatcattctgcttgacgagccgacgacttatctcgacatgacgcatcaaattgaaattcttgatttgctgtttgaattaaatgaaaaagaaaaacgcacaatcgtcatggtgctgcacgatctcaatctggcatgccgttatgcccattatctggtcgccataaaggataaacagatttacgcagagggccgtcccgaagaagtcatcacttgcgagcttgtacagcaggtctttgcaatgaactgtcaggtaacgcaagatccgctgttcggcacgccgctttgcattccgcacggacgcggcagatgtatcgtgcaggaagcggccctcaccgcccgattgtcataatcatgaaaaagggaaggaaacggtatggaagaaaaactgcagcagcagctggacggcctgcttgagaaatacactgaactattgcttggcgaaacaaacccggatgtaaaggaagaagtcaggcagtggattttgtatacacatatcgcaaaaagcatgccgccgctcgtcaaacattggaatcaatcctacccggacgccaaagagggcatcaaagctgcgatacagcacattaaacagctcaatgaagctcacagaaaaaaacaataaaaagctttcggcatcaaagagaggtgccggaagctttttttgctgaaaaggaatcaataaaggcgccgttcaattcataacgaagaactttaatgtaactaacacacccgtttgtttacttgctgaaccaagaaaaaaggaccgccgcagcaatcccttactctttcctatatatcacatttcctttcggatacgtaataactcttcaaatgcttttatatttgtatcaaaattgggcactgtttgagattcctcggcacatttgacttgtgctacaaccaaatcattaaaaggtgttgaaattccagtaccttctgccattttgggaataactccattaatataatcaatttcagttttgcgttttttctcaagatcctgaagcatacttgctcttaaaagcctggatggttccatggctgccctaaatgtttgaatacgttcaggaatctcattttcactttttaattccaaagattctaaatcaaggccgcccattttcgcaaatgtgacaccattggcgtgtccaaccttaatcgtctcatctgcgatatgaactgcgctgacaatgccgatttcatggtcaagaatatcaccgtattctccgtttaatgctgccgataaaccactgaatgcattattgataagtaattttgaccacttcgttccaactaaattatcggaaatatgtgttccgccgataaggtctaaaaccgatttaatacgctggattctttctgttgtttcaccatttaattctccaatttgaaaagcgtactctttaaattgagtatactcagttgtaagtctggatacgcctggttcaataaacgtagcaccaaattcaacagaacctgcaataacacgttcaccaccaacgatcgaagcaactttctgttcaggtataccgttttgcaaggaacatactacactatcatcctttaaaaaaggcagtaactctttaagaatggagtcattatataattgtttcgtcaggagcaatatgaaatcatacttgcctgacttgttttcaggggtaatggcttttacctttgcctgaaatgccgttgtaccaactactttagcacctatttgatttaaagtatctacatgttctttgtatgaatcaattaattcgacatccattccgccagcagacagatatgctccaactatggttcctaaagaacctgctcctaaaattgcaattctcattgtaaacgtctccttatttttcctctaagtagttataaaccggctgtgctgcatttaaggttaaatccgtaataatatgagatgctgaaacgacttctaatacaggcaaatctgcaagaggcgccagagcatgttcaaataattgaagccgcgccggtccagaccaggcacctttaacttctatattcgttatttgcgtgcgcaccaaatcgcaaacccttaaatcaccattgtaatcagtagcaatcttaaccataaaattaggtcggcaaatttcccttttcgctttttccttgtccatttcgaaatgtttatatcccatagtcgcagctgccacacgaagactgccataatctaatgtgccaacgagagtatcagagtctatatacagcttaggggcgcccaatttctttggatatgcagtaagttcccgtccgcttgcaatagccgggaaattgtctacatacatagagtgtacataatctccttcttcaccattaaagctgacagggatgacttgtcctgcctctgtataggcaccaagtccggaaacatcgggcatccgcatcacttcgaatttcactaaaggttcagtaatttcaagaggttccggcactgccgcacgcaaagctttttcatccgttcggtaaataatatttaaatattcacggttaacaaatttataatttgggataggataagcaggagccgttagcggtgtatttaaattttttgctatatctttcacatcaattttcattgcatgacaccctttccttttctttaactatgctattatcttacatccgcatttacatttaatctaatacataataaggtatatatatatttattgaaataaataagggggatgcagacagatggaattgctgcagctaaaatactttcagacagttgcctatactgagcatatttctaaagcagcagaacaattaaagattgcccagccttctttaagtctcactataaaaagacttgagaatgaactgggaacagctttgtttgagagaaaaggcagaaatattaagctgagttcatcagggaaaattcttttaaaacatgtaaacaggatttttactgagattgaaaatgcacaaacggaaattcaattggaggaacatcaaatgtctgacaccatcagaatatctatttctaatccgagattccttgcaggactgatgagtgaatatatcaaccgctcccctcaatcaaaaattctccaagccatcggagttaaaagcgggatcctaacaagtttaaaaaaaggggacattgatttaggaataacaggtcatcctattcaagatgaagagatagaaagttgtatgctggtaaatgaagatattgttctggctttgccctcaaaccaccgatttacgggtaaaaccgaaatttctttacgtcttgtcgccgatgaaccatttattacccttgctaataatgaagagtatagcggttttacagcctcgctttgtgaaaaagccggtttcaccccaaatattgcatttgaggcggattctcatttactggccgagattataaagctggatcagggggtggcgttgcttcctatttcggtttgcagaacattggggctgaattttataaaagtgactgatcactctgcttcatatccagtcggcttatcttggatgaaacataagctgttatcttcttcggtaagaaattttcgtgactttattttgtcgtactataaagataactatgaaatgtttaaggtttattaaataattttcacccccgatttccaatgaggcggaagactggtcattcggaaacggagaggcccagatgatataaaaaaatcccgcggcatccgcgggatttttctttgttaaacggctttcgccttttcttcttgtttgcctgtctttttgtttgtcagcttaattgatttaacaaacagcgtgaggatcaatccggcagcgataaaggccaggcctgtgaaaaacacgctgtgaagcgaatccatcagtgacgttttcaaaaccggcacgatatgggaagaaaatgcggccgggatctgcttaatcgattcctgactgaacaaggattgaagcagcccttcaggatttttgtcaatcatacctttaaactgggcggcaaaggcacttgcctgtttcgggagtgagtctaagtaaggcaccagtctgtcggttaaaaggcttcctgatctggcattcatgacagcgccgagcaccgtaatgccgaacgttcccccgatcatccggaaaaattggcttgatgaagtcacaacgcccagctcttcttttgaaaacgtttcttgcagagcgagtgtgagaagcggcatgacgagccccattcccagaccgatcactgccatatagcacgtagccgcgagcttgcttgtatccagctgtaaggtcgttaataagaagaagccgacggccatgatcagcatgccgatcatgatttgcggtttaataccgatcttataaaccagctggcctccgataatacttgtgataatcatagataccatcatcggcgtcataatcgtgcctgacgcggtggcgctgactccgataattccctgcataaagaaaggaacgaacgtaacggcgccgaacatgccgatactcatgaaaaacccgatcagattcagtacggtaaacgttctgtttttaaacaggtacatcggcagaatcggttcttttgctttgatttcagcgaaaatgaatccgacaatcccggcaagcgcaagcgcaaagagaccgagaatctgccaagagccccatgcgtaatcttttcctccgaagctgagcgcgagaaggaggctgacgattccgacaatcattgtgaaaatgccggcgatgtcaaagttaatcggcccagtctgttttctgccttgaagtcctcttgcgataaagatcacggctaaaattccgacaggcaggttgatatagaaaacccatttccaatttaatgagtcaacaatccagcccccgatttgcgggccgataacggaagcaaggccgtaaatcgctccgaaaagcccttggaacttggcacgctgtttccctgtgaacaaatccccaatgacgatcatggccatcggcatcatgacaccgccgccgattccctgaagtccgcggaaaataatcagttccgtcatgttgctggccattccgcacagtgcggaagctcccataaaaatcaataaacctgacacatagacgacgcggcgccccaataaatctgcaagtttccccgcaatcggaacgatcgtcgtcgaagttaaaagatatgccgtggtcagccacgtcatcatgcttaatcccccgaggtcacccacgattttaggaatcgccgttcctacgatggtgccgtcaagggctgagaaaaacatggcgatgattaagcccgttattaataatgtgcgttttggatctttcttttcaatgctcatgtttcggcagctcctctttctattcgttttctttttgatcagccgcgtatttctcggcggcttccgctactttgcggatgatgttcacggactgaatcagttcatcgtcagtcagaacggacaggttacgcgccagtatcgctttccgtccttccacaacatcttcgaattttgtttcgccttttttggtgaggctgatgtcgatgacgcgtctgtcctgctggttatgtttgcggacgataagtcctttttgttcgaggcggtcggccatcagcgtaaccgcgctcggctttacctccatgcgttccgcaatttcggaaactttgcagctcccgtgttttttcaggctggctaaaacaaataattgggcaggcgtcacctcgtgttttgccatgctttccaccatttcaggctgtatgttttgcagcagcgtctgaagagatttctggatgtcagacacatattgatccgcgtttttcataactcctcctcatcttgttccttgagaaaataattaacattagttaaatataaataaggattaatgataagtcaatctttttgtgcaaaaataaaaaaaggactgatgcttggcgaaaacatcaaatcctttttcattttactgctggtagggagactgctgctgaatggtctgccggaacttctgatacgattgctgaagcttttgggtatcggcggcttcaatggaataccagccattttgaaacatcacatcgtataatcttctttgcgctttttgtgactcatcgaaaatcgcctgaatatcttgataaagagactcgtggctgaactcgtgcagggctgtgcaatatgaagccgtgatgtatttttccgtcgtcagcagctcattgaccaagtctctgtcattcatttgcgccgtattgggcacgggcgtttgcggattcgtgattttttgattttgctgttccatgtattgtcctcctattgcatatagcctgttgttgtctgtccgccttgaccggggttcaagcggcccaatatgtgctgataatgcttctcatgcatccggccgatctgatcaagctcttgttttaacgtctgattctggcagtgttccgccataaaatgcgcttttttcatggcaagcagattccagttcagcatgtcctcaagatacaaatggtctttcgttgagatgacggcaggcggcaagtttccgtgctgctcttggttgttcatataaacgcctccttcaattctgttctttttagctttctctgcgatcgggatttcatacagataaattaaaataaccacgatttgcaggagagacatcaatatttacaataaaaaaagacactatcagaagaaaaaaccttcggataatgtctgttcatgttaacagttcgatatatgcgaaagtcagcagcggcactaggattggacttcagctgccggtttattgtctagatcagtgccggcttttctttcagttatttttatttttggtaaaagaaaagcagaaaatactccggcaattaatagtataagccctgcgaaaaatacactgcgaagagagtccattaacgctgtcttcattatcggtatgatgtgctttgctatagaatgcggaaattgttcgaatgaaccagaactgaatagcctctgtagcaggacttgaggattgctgctgatcaagtctttgagatgagctgctaatgcgttttcttgttttggaaaattgtctaaaaaaggaactaatttatcggttaatatatttcctgacttggcattcatcactgctcccagaatcgtaattccaaacgtacctccgatagagcggaaaaattggcttgacgaagtaaccacgccgagcgtttctttagagaaactctcttgaagtgccagagtaataatgggcataacaaggcccataccgaagccgatgatagctacataagtagttgcagttaatttgctggtgtcagcttctaatgtggataataaaaaataggcaaaggatatgattgccatccccgtgataatctgcgctttaatgccgattttaaagaccagctgcccgcctataatactggagataatcattgcgaccatcatcggcatcatgattgtcccggactctgatgcactcatgccgattattccttgcatgaagaaagggacgaaggtgattgctgcaaacatcccaatactcataaagaaccctattaaatttaagaagataaaagttctgctttttagaagatgtataggcagaattggttctgcagcttttttttctgcaaatacaaaactaataatacttatagtggccaaagctaacagacaaaatgtctgccatgataaccagtcaaattcttttccgccgaaactgagtgtaagcagcaaacagactacacccgtaatcattgtaaacatcccgatgaagtcaaaatgaatcggacccgtgtattttctggcctgcaatcccatcgcaataaagaacacagctaccattcccacgggtaaattgataaaaaatacccaatgccagctgaaagaatctacaatccatcccccaatttgcggaccgattacagaagcaagagcgtaaataccgccaaatacgccttgaaatctggcacgctgtttgcctgtgaataaatctccaatgacaatcatagccatcggcatcataatgcctccgccaagaccttgtaaacctcgaaacacaattaattctttcatgttatcagccaggccgcacagtgaagagccaatcatgaatataatcagcccggccacatatactgcccggcgccctaatagatctgcaagttttccagcgatcggaacgatggaggtagatgttaataggtaggccgtagtcagccaagtcatcatgctcaggccgccgagatctcctacaatcttaggcataaccgttcctacgattgttccgtccagagcagaaaaaaacatagctataataagtccaattaataaaagtgtacgtttagattttcctgttgaatccaattgaaggttccctcttttcatatgtttcgagcttagtgattcttcaaaataaggtgaatggataactcaggcaggtcccttctttaaattccgttagggaagagaagccatctttaaagatgaaggatcgtaaagctattagaaagaaataataatgctttggaggtatgtttgtgaggcaaagataaattcagcagaattatcattttgaaattctgcttttccttcttaatagatacgttcaataaactgaattatcaattttaaatataagccattgtaaattataaatcaattatcttttaaggaatattttcaaattataaggggataaagaaatataaattataagtttttttgggcgaaatgtaacgaagaagcggaattatagctcgaaaactcaattgaagaagtagtgatttttattgatcctttttgtgactcattaaaaccgtttgaatatcttgataatataatacattgctttgacatcagagtctgtatggatatatgaatgatatcttggcaatctgcatggcttttgtgttttagctttctctgcgatcggaaattcatacacgaataaaagaaaaaggagggagttcatccttgctgcggagcatatgtttatttttgtcgaaaaataaaatgcttacaaaattcgcccaggcttacggaatccgcttcggcgcgggaaggttcgttgcaggggaaacgctcacggaagctgtgaaaacggtaaagcggctgaaccaaaaagggctgtcggcttcgattgattatctaggtgaatatgcgggttcagagaaggatgcgaaaaagacggcggaagaatgtaaaaaagcaatcagggcgattgccgagaatcaactggattgtgagctgtcgctgaaattaacatccatcggtctggatatttccgaggaactcgcggaacagcatgtcagagacatattgacggaggcaaaagaacgcggcgtgcctgtaacgattgatatggaggactattcaagatgcggccgtacgcttgagctgtataagcggtgcaagccggattttccgatgctcggcaccgtcattcaggcttatttataccgcgcagctgaagacatcagcggtctgatgccatataagccgcggctcaggcttgtaaaaggcgcttataaagaatcggcggccgttgcgttccctgataaaaaagcaaccgatcttcattttcagcagctgattaagctgcagcttttgagcggctatgaaacggcggtggcgacacatgatgacgatattatttcgtatacgaaaacactcatcagcgagcatcagattccccgggagcagtttgaattccaaatgctgtacggcatcagaacggagcgccagaaggagcttgccgaagaaggatacaggatgagggtgtatgtcccgtacggaaccgattggtacgggtacctgatgagaagaattgccgagcgcccggcaaatgcggcgtttgtgctgaaaggaatcttcaaaaaataacggctgctccaaaaagcagccgcagtatgttattccatgttgtcttttttatattgctgattttggctcgtccgtttgccgccgccgtatttttgcttcggtcccgcatttcctttcatgctggccgcgctcactgcggcagaagacggatcttttctccctcgcaccattcccttcacctccgggtttaagtttcccgcccgcgccatggaacatgcggaagccgaaaaatttaaaaaaattccatatttgctattgaagtcatcctgaaaatcttttaagatgaaagaagaaaagggtttcattttttttgccgaaaaaatgaatgactattcattcaaagttcaagggggatgactcatgcacaagtttataaagaaagcagccgttctcggatcaggcgtcatggggtccggaattgccgcgcacttggctaacatcggaattcccgtcctgctgcttgatattgtgccaaacgagctgacaaaggatgagatgaaaaaagggctgacattagaaagcccggaggtccgcagcagactgagccgatcggccatgcaaaagctgctgaagcaaaaaccggcgccgctgacttcggctgccaatctcgactatataacggcggggaatttggaagatgacgcagctcaattgaaggatgctgattggattattgaagtcgtcgtcgaaaaccttgacgtaaaaaaacagattttctcactcgttgatgaataccggaaaccgggaagcatcgtgtcgagcaatacgtccggtatctccgtcacaaaaatggcggaaggccgatctgccgattttaaggctcatttcttaggaacccatttctttaatccggcccgctacttgaagcttctggaaatcattccgattcaggaaacagatcctgacgtgctggagtttatgacttcatttgcagaaaacacgcttgggaaaggtgtcgtcatcgcaaaagacacgccaaactttatcgccaaccgcatcggtacgtacggcctgctggtcacggtaagagaaatgctttcttccggctgccgcatcggcgaggtggacacggtgaccggacctttgatcggcagaccgaaaagcgcgaccttcagaacccttgacgttgtggggcttgatactttcgctcatgtggcaaaaaacgtatatgataaagccgacggcgctgaaaaagacatgtttaagcttcctgaatttatgaatgacatgctgaaaaacaattggctgggcagcaaatcaggccaaggtttttacaaaaaagaaggtaaaacaatatatgaactcgatccgctgaccatgacatacggtgagcgctcgaaaatgaagacgcccgctttagaagccgccaaacaggcaaagggtgccaaaggcaaaatgaaagcgcttgtatattccgatgaccgcgccggacgcctgctttggaatatcacatcgcaaacactcttatactcagcccggcttttaggtgagatcgctgatgatataaaagcaattgatgacgccatgaaatggggcttcggatgggagctcggaccgtttgagatgtgggatgccatcggcgtcagaaaatcagcggagcggctcgaagaagaaggcgcagcactccccggctgggtgaaagaaatgcttgatcagggtcatgaaacattttatatgaaggaaaacggaacacaattttattattcagacggccaatacagggctgtgaaagaaaatccgaaacggatcagcctgcagacgttaaaagaaacaaaaggcgttatcactaaaaacagcggcgcaagtctggttgatctcggcgatgatgtcgcgctgctggaatttcatacgaaaagcaacgcgatcggcttagacattattcagatgattgacaatgcgcttgaggaaacggagcggaattataaaggtcttgtcatcggaaaccaaggcagacatttctgcgcgggagcaaaccttgcgatgattttaatggaagcccaggatgataacttcatggaagtcgattttgtcatccgccgttttcagcagacgatgctgaacatcaaatacagcgctaaaccggttgtagcggcgccattcgggatgacactcggcggcggcacggaagtctgtctcccggcggcacgcgttcaggcggcgagcgaatcgtatatgggtctcgttgaaaccggcgtcggtcttattccgggcggcggaggaaacaaagagctgtacatgaattatctggacggcggaagtgaactcatggacgcagcgattaaaaccttcgaaacaatcgcgcttgccaaggtgtccggttcggcacacgaagcccgtgacatgaagattttgtccgcggcagaccgtatcagcatgaatcaggatcacctgctgcacgatgcgaaacagctggctgcttccttatatgacagcggataccgtccgcctgcccgcaaaaaagtgaaagtcaccggagaaaccggctgtgcggcattactgctcggagcagaccaaatgagacggtcgggttatttatccgatcacgatatgaagattgcgaagaagctggcccatgtcattgccggcggaagagtcccgttcggcacggaggtttcagaagaatatttactcgagattgaaagagaagcctttttaagcctcgctggcgaggcgaaatctcaagcgagaatgcagcatatgctcgtcaaaggcaaacctttacggaactaggagggtgtttatgagagaagcagtcattgtggccggtgcgagaaccccggtcggtaaagcgaaaaaaggatcgcttgcagccgttcgtcctgatgatttaggcgcgctttgtgtaaaagaaacgctgaaacgggcaggcggctatgaaggaaatatcgatgacttaattatcggatgtgcaacacctgaagccgaacaaggattaaatatggctcggaatatcggtgcgctggcggggcttcctcatacggtgccggccattacggtgaaccgctactgctcttccgggctccaatccatcgcttacggtgctgaaaaaattatgatcggcgcgggtgataccgtcattgcgggcggtgcggaatccatgtcgcaagttccgatgatggggcatgtgacacggccgaatatcgctttggcggagcatgcgcctgagtattacatgagcatggggcatacggcggagcaggtcgccgaaacgtacggagtatccagagaagaccaggatgcatttgcagtccgcagccatcagaatgccgcaaaagcccttaaggaagggaaattcaatgacgaaatcgtgccggttgaagtatcgctgacagaagtcggtgatgaccataagccgcggaaaaaacaatttaccttttctcaggatgaaggcgttcgtcccggcacgtcggctgacgtcttggcgaagctccgcccggctttttcaaaaacgggaaccgtgacggccgggaactcttcacaaacaagtgacggcgcggcggctgtcatgctgatggatcgcgaaaaagcatcgtcgcttggattggccccgcttgtcaaattccgttcctttgccgtaggcggcgttccgcctgaagtaatggggatcggtccgattgaagccattccgcgggcgctcaagcttgccggactcgaattacaggatatcgggctttttgaattgaatgaggcctttgcttcacaggccattcaagtgatcagatcgctcgggatagatgaagaaaaggtgaacgtcaacggaggcgccatcgcgctcggacatccgctcggctgcacggggacgaagctgaccctgtcactcattcatgaaatgaaacggagaaacgagcaattcggcgttgtgacgatgtgcatcggaggcggcatgggcgctgccggcgtatttgaactcatttaaaaaaagggggaaatgaacatgaaacaggaaacggtcaacgtcaaaaaaggcggcagctttctgattgaagagacgggatatgatcaaatattcactccggaggactttacagacgaacataaaatgatcggcaaaacgacagaagactatgtcgtaaacgatgtgcttccttatatcgatgaaattgaaaaccatcagtttgagcattcggtcagactgctgagaaaagccggagatctcggcctcctcggagcagacgtgcctgaagagtacggcggaatcggcctggataaaatcagttcagccttcattacggaaaagttttcacgtgccggcagcttttcgctatcttacggcgctcacgtcgggatcggttcattgccgatcgtgttcttcggaacggaagaacagaaaaaaacctatttgccggacttggcttcaggacaaagaatcgcggcatacgccttaactgagcccggttcaggttcagatgccctcggcgcgaaaacgacggctgttttgaatgaagcgggcacacactatattcttaacggagaaaagcaatggattacaaactccgcctttgcagatgtctttgtcgtctacgctaaagtggacggagataagttttccgcatttatcgtagaaaagaactatccgggcgtatcaacgggaccggaagagaaaaaaatggggattaagggttcatcgacaagaacgctgattttagatcaggcggaagtcccgaaagaaaatcttctcggcgaaatcggaaaaggccatgtcatcgcctttaatatcctgaatatcgggcgctacaagcttgccgtcggcacaatcggcgcttcaaaacgggtgattgagctgtctgccgcttatgcaaaccagcgccggcaatttaaaacgccgatctcaagcttcacgctcactcaggaaaagcttgcgacgatgtcagcgcggctttacgccatggagagctctgtatacagaacagtgggcttattcgaagataatatgagcagactgacggaagaggagcaaaaagacggacgcgaagtcgcgaagtccatcgccgagtacgcgattgaatgctcgctcaacaaaatgtgcggttctgaaacgcttgattacattgccgacgaaggggttcaaattcacggcggttacggatttatgcaggaatatgaagtggagcgcgcctatcgcgactcaagaatcaacaggatttttgaaggcacaaatgaaatcaaccgcctgatcgtaacgagcacgtttctgaaaaaagccgtaaaaggtcagctgccgctctttgaaaaagcaaaagcgctccaagaagaactcatgatgctgatgcctgaagagccgggctcagaacctcttgaacaggaaaaatacattgtcagacaggcgaaaaagatcgccctcttgacagcgggtctcgcggcgcagaaatacggcaaagagattgaaggcgagcaggaaatcatggtgaacattgccgatattgtcagcgcgctgtatgctttggaatctgccgtcctcagaacggaaaaagcaattgcggcggacggtgccgaaaaagccgcgcagaagctgttatatacggaaatctttgcccaggaagcccttcagaacattgaagcgcacgccaaagaatcactgatcgccatggaggaaggagattccctccgcatgatgctttccgtgctgcgcaaactgacgcgcctgacgccgaaaaacctcattcagaaaaaacgtgaagcggcagcagccgtcttccgtgaagaaaaatatacagtctgatcacatgctgaaagcgctccttcatcaggggcgctttttcatgaagcaacgttataggtttttacaagtgattgtgttaaaataacgacgatcatttacaaggggtgaagaagatgtcgttaaatttttactggtaccctaaatgcggaacgtgccgtaatgcgaaaaaatggctggaagaccgcggtaaggaaataaacgaaatacatatcgcggaggaaactccgtcgaaagaagaaattaaagacctctatgaaaagagcggtcttgagctcaaaaagtttttcaacacgagcggaatgaaataccgcgagctgaacttaaaggaaaaactgtaccatatgtcagaggatgaacagctcgaacttctggcatcagacggtatgctcctgaaacgcccgattacgacagacggcgaaaaagtcactgtcggctttaaagaagaccaattcgaaaaatattggatgtaatgccaggttcaaagaattatggtatcttcttattataagaaaaaaatggagggatttagatgagcacaccgaaagatatgcgttattccaaagagcacgaatgggtcaaagttgaggacggaaaagcccgtatcgggattacacatttcgcgcaagccgaacttggcgacatcgtatttgtcgagcttccggaagtcggcgccgaaattaaagcggacgagccattcggcagcgtggaatccgtcaaaaccgtatccgaactgtacgcaccgattaacggaacggtgacggaagtgaacgaagaccttgatgacagtcctgaattcgtaaacgagtctccgtatgaaaaagcgtggatgatcgtcgtggaaccggctgatgctgaagaaatcgaaaacctcatgacttctgagcaatatgacgaaatgacacaggaagactgatcggatagcaaaggggccatttggacactctatctgtaacgggaggtgtctaaaatggcttttgataaacaaaaggtcgatgtgacggagaacgtcacgggccgctttcaaaacggccggttttccttgtttcatgaaaatgaagccatcggcgagatgacaggcatggaccagtacgagctcaaacagggcttttcatttgaaaatcaaaaattttataaaacagccgatgtcataaacggcagcgatccgaaatatgtcgattgcgattatgagaatggctggtgttaacagttggcggtgaatttcactgccttctttttcaatctgacgctaaaacaatcggcaggtgacgcgcttatgtacaacggagatgaaaaggtcattatcgtagaaggaaaatctgataaaatcaaagtcagggaagtgctcatcgaacccgcggaaatcgtctgtacaaacgggacgatcggccaaaccgaactggaagagttggcggaccgcctgtttgacagagacgtctatattttaacggacgcagatgactccggagaaaaattaagaaaacagctgaaacgggagcttcccgaagcgcgccatatttatatagacagaacatacaggcaagtcgagtcgtgcccgggccatcatctcgcatctgtgctgatcagagccggctttgatgctgacactgtatttttgaaaaagaacgacctgaggtggtaatcatgaaagaactccaagaaaatgaactcgaatcgattcaggatgacgtttatctcctgtatttgtacaccccgttttgcggcacatgccagctggcgtccaaaatgcttactgtcgtcgaagaaatgctgcccggtgccgccttctataaaaacaacgtgaattattcccccgcattcgccaaagcctatcagattgaaagcgttccgtgctttttgctgtttaaaggcggagagcttgttgagaaaggatacgccttccgctccgtttcctatttatatgagctgattaaacaaaaaacatcgcaaacgttcccgatgtgacaatatttacaggaaaatgtcgtgcggtttataaagggttctgtccgttaaaaagagaaagtgtatgtatggccattaaaacgggaggttatacgagtggagaaaatagaagtttcagagaatgacggacagcatctgtttttgaaaccgctattaaacgcctcaacgctgctgattacattccaaggagaaacagaagccttaacggtctcaattaacggacagggagaaatgagaaaaacgtcggcttcaaaggagaaatctaatttgaccttttacggaaaccagacggaaatcatccatctcctgcatggtgatgtctctttgcaaaagcttatccaaagcggaaaactcaaagtgaaaggatcattcagagccctgctgaagctggaggccatcctctggctgacaaacggattttttcaggcgatcagtaaacggccgtaactgccaatctactatgtgacaatagcttccaatatttattttattgactttttatcattcgccgtgctattctacagtaagaatttccggacgaaaatacgatatgttttctcttatcaagagaggtggagggaagtgccctatgaagcccggcaaccatcaacaatgttgaaatggtgccaattcactcaaagcggtctgctttgaaagatgagagaaaggcctttttcaataagcctttctgctcatttttgcagaaaggcttttcttttgcggagaaacccggaagatttcttagaatagtgtaaggcgggtgattgctttgatccatcttcaaaatgtttcaaaaatttacaaagcgaagcatggggatgtcaatgctgtccaagatgtcactcttgatatcaaaaagggcgaaatatttggaattataggatatagcggagctggtaaaagttccttaatccgtctcctgaacggccttgaaaagccgacgtcgggaaccgtggaagtcgcggggacggaattaaataaagtaagcagccgcgggctgagaaaagcgcgccaggaaatcagcatgatcttccagcattttaaccttttgtggtcgcgcaccgtccgggagaacattatgttcccgctggaaatcgccggcgtgaaaaaaagcgaacgggtccgccgcgctgatgaattgattaaactggtcggattagaggggaaagaaaaatcttatccgtcgcagctgagcggcggtcaaaagcagcgtgtcggcatcgcccgggcgctcgccaataatccgaaagtccttctgtgcgatgaagcgacatcagcgctcgatccgcagacgaccgattcaattttggatcttttatccgatataaatgacagactcggtctgacgatcgtgctcattacccatgaaatgcacgtcatccgaaaaatctgcaacagagtcgccgtcatggaaaacgggaaagtcgttgaagaaggcgaagtactccaagttttcagaaacccgcgcgaaccgatgaccaagcgtttcgttcagcaggtgacagaaccggaggagacgaaagaaaccatccagcattttctgcaggaaacagcgacagggaaaacgattcagctttcatttgtcgggcaggccgccgagcagcccctcattacggaaatgatccgaaactttgatgtggacgtcaatattctgcaggggaaaatttcacagacgaaggacggagcttacggttcattattcattcatattgacggtcaggaaaaagaagtagaaaacgtgatccggttcatcaaagacaaacaggtagaagcagaggtgatcacaaatgtttgaaaaatggttcccgaacgttgatataaccgagctgtggacggccacatatgagaccctttatatgacggtcatcgctttagttttttcatttatcatcggagcgattctcggtcttctgctctttttaacgggcaagggaagcttatgggaaaataaaatcattaacaccgtgattgcggcggtcgttaatattttcaggtctattccgtttcttattttaattattctgcttctcggctttactaagattctggtcggatcgattttaggaccgaatgccgcattgccggcgctgattatcggctccgcgccgttttacgcccgtcttgcggaaattgcgctccgggaagtcgataaaggagtcatcgaagctgccagatcaatgggagcaaagacatcgacgattatcttcaaagtgctgattcctgaatcaatgcctgcgttaatttcaggcatcaccgtgacggccatcgccctgatcggatctaccgccattgccggcgccatcggttcaggcggactcggaaaccttgcatatgtagaaggctaccagtccaataatacggatgtaacgtttgtagcgacagtatttatactcatcatcgtctttatcattcagattatcggtgatgtaattacaaatataatagacaaaagataagggaggatttacattgaaaaagattgtattaagtgcgctgctgcttgtgttcgcgggagttttagccgcctgcggatcaaacggctcgaataaaaaggaaatcgttgtcgccgcgacaaaaacaccgcatgctgaaatcttaaaagaagcggaaccgctcttgaaggaaaaaggctacacattaaaagtaaaagtgctgaacgattacaaaatgtacaacaaagcgttagctgataatgaagtggatgcgaactacttccagcacgttccttaccttgaacaggaaatgaaagaaaataaagattacaaactcgtgaatgccggagccgttcaccttgagccgttcggagtttacacgaaaaaatacaaatcactgaaagacctgcctaaaggcgcgaccatcatcatgactaacaatgtcgctgaacaaggccgtatgctggcgatgcttgaaaaagccggactgatcacacttgatccgaaggtaaaaacgattgaagcgactacgaaaaacattacgaaaaacccgaaaaacctgacattcaaaaaaatcgcccctgaattaacggcgaaagcatataatgaagaagaaggcgatgcagtcttcattaacgtcaactatgcgattcaaaacaaactgaatccgttaaaagatgcgattcaagtggaatcaacgaaaaacaacccgtacgcaaacatcatcgccgtacgcaaaggtgacgaaaaatcagagaaaatcaaagcgcttatggaagtccttcactctaagaaaatcaaagactttattgagaaaaaatacgacggagccgtgcttcccgtatctgaataaagcgaaaaccccggatgaatcatccggggtttttttcgggtattaatcggagaactgtccataataaaaaggaaggttaacgattggagggaatggcagtggctcaataccaggataacggaaaaagcgtgcatgacgcattgaaacaatataaagaaggtttaggcatattcgagcaaaaaatgcccatgatggggcggaagtttaatgaatttactgagcagtgtttctcagcggattcattaactgaaaaagagaaacaattaatcgctctgggcatcagcatcagcgctcaagatgaattttgcatgatttatcatacgaagggctgccttgaccaaggggccacagaagaaaacatccttgaggtcatcagcgtcgcggcggcattcgggggcggcgcggctctcagtcagggagtgaccctcgtgcagcagtgtattcaggaattcggacatacgacgcattagaatgagcaatcgtgtgaataccgtttttcagataaagcgagcgccggtttccggcacattcgaaaggattcaggggcacaccctctttggccggagcagcggatcattgttacaatagaaacaaatatatgaagggattgattcattatctgcaccagccacgagagactggaccttgactatacgcctgaaatggaaaaagcgatgcagaagtcacacggcatcggctacgaggaatacggacggcgtctttcaaaaaggatggaagtcgaacggcagagggagcttgaatatcaaaaaagcaagttcctcgcagcgcagcttaatgagaaaatcggtcagtaaaaaagggtggatttccgccctttttctgtttcaaacagctttaattacgccttgatctttgataaactttaggaatgttccgggtaatataaaaagttgtatttacttttcatttgttataaaattagaatgagaataaattgagaataatgattatatattttggaggtatagatatggctgcttcaacattaacgatcaaggatcttcacgttgaaatcgaaggaaaagagatcttaaaaggtgtaaaccttgaaataaaaggcggcgaattccacgctgtcatggggccgaacggtaccggtaaatccacgctctcagcagcgattatgggacacccgaaatacgaagttacaaaaggaagcatcacgcttgacggcaaagatgtactggaaatggaagtggacgagcgcgctcaggcgggtcttttccttgcgatgcagtacccaagcgaaatcagcggtgtgacaaatgccgatttccttcgctctgcgattaacgcacgccgtgaagaaggcgatgaaatttctcttatgaaattcatccgcaaaatggacgaaaacatggagttccttgaaatggaccctgaaatggcgcagcgttacctgaacgaaggtttctcaggcggggagaaaaaacgcaacgaaatccttcagcttatgatgatcgagccgaaaatcgccattcttgacgagatcgattcaggtcttgatatcgatgcgcttaaagtcgtttctaaaggaatcaacaaaatgcgcagcgaaaacttcggctgcttaatgatcactcactaccagcgccttctgaactacatcacgcctgatgtcgttcacgttatgatgcaaggacgcgtagtgaaatccggcggcgcggagcttgcacagcgccttgaagcggaaggttatgactggattaaacaggaactaggcattgaagacgaaactgtaggccaagaagcgtaagcgttagggggataatcatgacattggaaacgaaactatccgtagatcaggaatatgtcaaaggcttttccgaaaagcatcaagaacctgcctggctgaaaaacctgcgcttacaggctcttgaaaaagctgaagatctgccgctgcctaagcctgataaaacaaaaatcacaaattggaactttacaaagttcaacaagcatacagtagaaaacgcgccgcttgcttctttagaagatttagctgatgaagcaaaagcgctgatcgatatcgaaaacgaagataaaacgttatatgtgcagcgtgatcaaacgcctgctttcctttctctttcaaaagaactgaaagacaaaggcgttattttcacggacatcttaacggctgcccgtgagcacagcgacctcgttgagaaatacttcatgaaagacggcgtaaaggtcgacgagcataaactgactgcgcttcatgcggcattaatgaacggcggggcattcctttatgttcctaaaaacgttcaggtggagacgcctgttcaggccgtttacgttcatgaaagcaatgacacggcattgttcaaccacgtgctgatcgtcgctgaagaccacagctccgtcacttacgttgagaactacatcagcacggtgaatccgaaagaagcggtattcaacattatcagtgaagtggtcacaggtgataatgccagcgtgacgtacggcgccgttgacaacctgtcagcaggtgtcacaacatacgtcaaccgccgcggagccgcgcgcggacgagacagcaaaatcgagtgggcgctcggactgatgaacgacggcgacacgatttctgaaaacacgacaaacctctacggagacggcacatacggcgatacgaaaaccgtagttgtcggaagaggagaacagacggaaaactttacgacgcagatcatccacttcggtaaggcttctgaaggctatatcctgaagcacggagtcatgaaagatgccgcatcttccatctttaacggaatcggcaaaatcgagcacggcgcgtctaaagcaaacgctgaacaggaatcccgcgtcctgatgctgagtgaaaaagcacgcggagatgcaaacccgattctcttaattgatgaagacgatgtaactgcaggacatgcggcatctgtcggccgtgtggatccgatccagctttactacttaatgagccgcggaattccgaaagaagaagcggagcgcttagtcatttacggattccttgctccggtggtaaaagagcttccgattgaaggagttaagaaacagctcgtctccgtcatcgaaaggaaagtaaaataatgaatatcaccgatattcgtgaacagttcccgatccttcatcagcaagtgaacggacatgacctcgtgtaccttgacagcgcggcgacttcccagaagccgcgtgctgtcattgaagcagtggatcagtattacagcaaatacaattccaatgtccacagaggcgttcatactcttggcacgagagcgacagacggctatgaaggtgcgcgtgaaaaagtccgtaagtttatcaatgcgaagtcaatggctgaggtcattttcacaaaaggcacgacaacttcactgaatatggtggcgctgagctatgcccgcgccagcttaaaacccggtgatgaagtggtcatcacccaaatggagcatcatgcgaatatcattccgtggcagcaggcagtaaaagcaaccggcgcgactttaaaatatatcccgatgcaggaagacggcacgctttcgctggacgacgtccggcagactgtcacaagccatacgaagatcgtggcagtcgctcatgtgtcaaacgtgctcggcacgattaacccgattaaagagatcgccaaaatcgctcatgacaatggcgctgtcatcgtggtggacggggcgcagagcacaccgcacatgaaaattgacgttcaggacctggattgcgacttcttcgcgctttcttcccataaaatgtgcggcccgacgggaatcggcgtgctgtacggcaagaaagaactgcttgagaatatggaaccggccgaatttggcggcgaaatgatcgactttgtagggctttatgaatcaacttggaaagagcttccgtggaaatttgaagcaggcacgccgattatcgcaggcgcgatcggattgggagccgcgattgattttcttgaagagatcggactcgacgagatttcccggcatgagcataagcttgcagcctatgcgcttgaccgtttcgagcagctggacggcgtgacggtatacggtccgaaagagcgggcgggacttgtgacatttaatcttgatgaggttcaccctcatgatgtcgcgactgtcctcgatgctgagggcattgcggtcagagccggccatcattgcgcccagccgctcatgaaatggctggatgtatctgctactgcgagagcgagtttttatctgtataatacagaggaagagatcgataagctcgcggaagccctccaaaagacaaaggagtactttacaaatgtcttttaatgcaaatttagatacattatacagacaagtgatcatggatcattacaaaaatccgcgcaacaaaggggttttggatgacagcatcgtcgtcgatatgaacaacccgacttgcggcgaccggatcagactgacaatgaagcttgacggcgataccgttcaggaagcgaagtttgaaggggaaggctgttccatctccatggcttcagcttccatgatgacgcaggccattaaaggaaaagatattgataccgccctttccatgtctaagattttctcagacatgatgcaagggaaagagtatgacgactcaatagatctcggggatattgaagcccttcaaggcgtttcgaaattcccggcccggattaaatgtgccaccctttcatggaaagcacttgaaaaaggagtcgctggcgaaaaaggcggcaattaaaagattggagtgaaaatggatggctaaaaaaatgcctgaaattggtgaatacaagtacggttttcacgataaggacgtttccattttccgttcagagcgcggattgacaaaagaaatcgtagaagaaatttcacgcatgaaagaagagcctcaatggatgcttgatttccgcctgaaatctcttgagcatttctacaacatgccgatgccgcagtggggcggggatttaaactctttaaactttgacgaaattacgtattacgtaaagccgtctgagcgttcagagcgttcttgggatgaagtgcctgaggaaattaaacagacatttgacaaactcggtattcctgaagctgagcaaaaataccttgccggtgtttctgcacagtacgaatccgaagttgtgtaccacaatatgaaagaagatcttgaagcgcaaggcattgtcttcaaagacacagacagcgcgctgaaagaaaatgaagacattttccgcgagcactgggcgaaagtcattccgccgactgataacaagtttgcggcgctgaactcagctgtttggtccggcggatctttcatctacgtgcctaaaggcgtgaaggttgaaacaccgcttcaagcttacttccgcatcaactctgaaaacatgggtcagttcgaacgtacgctgatcatcgttgacgaagaagcaagcgttcattacgtagagggctgtacggctcctgtgtacacaacaaactcgcttcacagcgcggttgttgaaatcatcgtcaaaaaaggcggctactgccgttatacaacaattcaaaactgggcgaacaacgtttacaacttagtaacgaaacgtacggtttgtgaagaaaacgcgacgatggaatgggttgacggaaacatcggttctaaattaacgatgaaatatccggctgtcattctgaaaggtgaaggcgcgcgcggcatgacgctctctatcgctcttgcgggcaaaggacagcatcaggacgcaggtgcgaaaatgattcaccttgcaccgaatacgtcatccacaatcgtatcaaaatcgatttcgaaacagggcggaaaagtaacataccgcggtatcgtccacttcggacggaaagcggacggcgcccgttcaaacatcgagtgtgatacgctcattatggataataaatcaacttctgatacaatcccttacaatgaaatcctgaacgacaacatttcattggagcacgaagcgaaagtatcaaaagtttctgaagaacagcttttctacttgatgagccgcggtatttctgaagaagaagcaacagaaatgatcgttatgggcttcatcgagccattcacaaaagaacttccgatggaatacgcagttgaaatgaaccgtttgatcaagttcgaaatggaaggctccatcggttaatagtaaaaccccgccatatggcggggtttttttgtttattgaatagtgaaatttccgtattcgcttgaccggacatgaatcggcccgtttaaattgtagttcttctctttgacaatatcgcggaaaacgtcgacacgggcaaccgattctctccattcatcctgggtgtcctcatctgccggattcatcagatcgtcatagcgtacatccaagaatttattgagccatttcttctcgtccgttccgtctttcggtgacccgcccatttttttgttcgtgcgtttaatcagggcataaaaggagtctggatcatcaccgtcaccatgctgaatcaccgtatcgtacatcaccgctttggccaaggccgttttcagtccggcattttctgaacgtttcatcgccggctgataatacaagctgtcgtttaccttatcctgggcagcgcggaaggctttatcattgccaagtgagcgccaggcagaagcgaatcctttcagattgctgatgtcatcgctttcgtccttcgcaagacgacgcaattcaggcaaatactttttcaatttgttattcggcaccgctttcgtatatacttcgactacttccagcgcatctccggtagccgtcgtaaagccggcccgcccgcaagtgtaacctcttccgtcatccaacgcttcaacatatccgtattggatttccgtctttccgttttcaaaaatgctggtcagctgttccgcacggcgcttctgatccttattcagcccggccgcaaaaaccgtaccgctcatcatcagggtaaaaaacatggtgaaaataagagatgaaaccgccgtcttcttccaaaaacctgcttttttcttcaaattgattttcattgccatacccctttcatatgtaagttacgcactcagtatacatgagggggtgatttttttgttgaaaacacacgaatttgtcaatattttgaatcctaagccctatccagcgcttcataaaaagaacgcaccaccttcaccagacagacaatcccgttctcgcatcattcttatctgtaacatagtcaacgcggtgaaacccgcattgtacagcctgctgaaaaagggcttcgagcatgtccggatctttgcaatataacgttacatacgagcaatctgcgatgagaagcacaagttcacaggaactatccaaatattctcatacgtattgatttccgttaccatcccgctcgggaaagctttcaattcagcacacaacatttcaggcagaaaagagagggaacgggcgatcacggaaatggtgagggtgctgaagcctggcggcacattggccgtgtcagatataaaaaatacatcacaatacagagcaattcttgaggaaaacggctttcagacaagaacgtattccttttattatacgtttccgttttcgaaacttatcattgccgtcaggactccggtaggaaccgggcgctctatttgttaaaataaataagacaaaacagatagaaaaggtgttacacatgaagtcttatatgattatcggagccggcattctcggtgcgtccgcggcttatcatctcgcaaaggccggtgcggatgtaacggtctttgacaggaaacacccggggcaggcgactgacgccgctgcagggatcgtctgcccgtggctgtcgcagcgccgcaaccaggcatggtatgcgatcgcaaaaggcggagcccgctattataaccaattgatacagcagcttgaagctgacggagaaacggacaccggctatcaaaaggtcggtgccgtcagtctccatacggatgaaaaaaagctcagccaaatggaggaaagagcttataaaagaagagaggacgctcctgaaatcggtgacattacgagactgactccggcagaaacgaaggcgctgttccccgcgctgtcggaggaatacggggcggttcatgtcagcggcgcggcccgggtgaacgggagggcgcttcgtaaggcgctgttaaacgcggccgttaatcacggcgcggctgtttacaatgaagaagcgtcaatattgacagaggacggtgccgttatcggtgtgaaaaccgcagaacgcacgcttactgccggccaggttctcgtaacggccggcgcttgggcgagagagctgcttgaaccgctcggcatccgtttttcagtatcataccaaaaggcacagatcgttcatttagagcttcagggagaggatacgggcggctggcccgtcgtcatgcccccaaacgatcaatacattctcgcctttgacagcggcagaatcatagcgggcgcgactcatgaaaacgataccggcatggatttgcgggtgacggccggcggcctccgcgagatttttgacaaagcattaactgtggcgccggggctttcagacagtactgtgatagagacaagagtcggtttcaggccgtttactcccggttttcttcccgtcatcggcaaagtgccgaatatcagcggactcctcgttgccaacgggctgggcgcctcagggctgacgagcgggccgtatctgggggcggaactggcgaaactcgcactcggccagcagacggaaattgatttgagcctttatgatccggccggggcgcttgaataaaaaatagcttttggcgcattcttatgataggatggagctttaatgaataagaggacgtgacccattttgataaaaataaaccttcctgctcctgatgtaacgattacggaacggcagcagtcaccgtcggaaaatgaaccggcgattaaagcgatttacggtttcattgattttcaccgcattccgagagacaaaggcggcatctttatgttttataacattcatgatgaactgctgtttgtcgggaaagcccgtaaattaagacaaagaatcaaaaagcattttgaagacaatgtgtcgcctgttaaacatcacagggacgaagtgtataaaattgaagtatgtgtcgtcaatgatccgatggaaagggagatttacgaaacgtacgcgatcaatacccttcagtcgaaatacaacattgagaaagtattttataaataagaaaaaccggagcttaagggctccggttttctttatgtttacagtgccagccacatcactgcaatatgcacgatcagcagacagtaaacgacgaggaacagctgaacgaccttttttctgaataacatgcagatcatcatgagcacaggaaaaatcaggacgccggccgttttattgattgatgtattcggacggttcgacacgtcatagtgaatggccatatcagcaggaagaaacggataaaacacaatcgacagaataaaggcgagaaccacagctccccacagcaccttatcattcatcaaaaacatatgaacactcccttttttacctataatagtattttagtgtgaaaaagttcatttttcagtatttatttgatggctgtgtgctgtatgggtatttttaaacgcggcggccgccattgagacgatcgctcttgcggtagcggccatcattttgacagtagcaagcgttgacgaagattccgatttaggaaaagagcagctcatcgctaatgtcgttgaccgcattaacgcacagcactgaggatgaagaaagaaaacgctaaggagacgagccttagcgtttttttgattgaagcatctgttttaaatatgcttctgaatcaaagccgagttcctcgtcggcttcttttttcagttcaagctgaagtcgcacatacgtgtcatatttcgggctgagcttttgaagtagattgctgaaaggcgatccttccttcagcgcgggcagatcagaagcggattctccgatcttgatcaggctttctctgtactcttcatctgtctccactcttttcacaagctgaatgatgatgtttttatgagtgtcccaagtggcggggtctctctccaaaatccgctcgataaattggtcatgctggactttgtgctgttggagctgagccgggtcctccttaccgaccagctgcatcatcgggtgtgcagccggaacttcttccatatcatccaatactttaataagctttgcccatatcgtttttttctcatctgtatcaatagaaaagtcgaggaacggttcaaacagcgcggcgataaattctccgaaatctcccgggaacagttttttcagctgaagtcccatatacttcggttcatctattttgacctcgccgatatcatgcagaattgaatcgacattttccgcatcttccacgcgcttgatcagcatttcagtcagtttccgttcctgctcaagctcttcaatctgccggctgagcttttgatgctgctggcgcagtatatcatgcagactgctgccctctaagaggaacgctttaatatcgcttacagacagtgccagcattcggagggcggcaatcattttcagcgtattcacgttctgagcggaatactcacggtatccgttatcagggtttttgctgacggtgattaaaccttcctgctcataatatttgatggcttttttcgtgagacccgtctgcctggcggcttcttttatattcattctgaatcactccctgcttttcattctaaacgtgtctctaagggtcaggtcaagaaagggcgggaaattagacgggtttattctatattttagaaatttcagaaaatatgattgacaacgcacctttgttgcgattaatataacgttatataatgttatataacattatataataaaacactgaggagtgaaggatttgagtcaaactgccgcacaagtgaatcacaaggttcaggctttcttggatgatctgaaaggaaaaacgattgaccacgtctttttcgtcgcttgcgggggttcttcagccattatgtatccgagcaagtacgtgtttgacagagaggcgaaagccatcagctctgatctctacagttcaaatgaatttattcagcgcaatcccattcagctcggagagaactctctggtgattttatgttctcagtcaggcaatacgccggaaacggtgaaagccgccggtttcgccagaaaaaaaggcgcgcttacgattgcaatgacctttgagcctgattcgccgttagcgaaagaagccgaatatgtcgcggtgtatgactggggtgagaacgcacaggcgataaatacgaattacggggttctgtatcaaatcgtgttcggcgctttacacgtgctggaaaaccatcccgcgtttgagcaggcgatcgacggactcaataaactccagaccgtatatgacaaagcgcttaaacaagaagcggatcacgcaaaggcattcgcgaaagcccacgaaaaagaagatatcatttacacgatggcaagcggtgcgaactacggcgtcgcttactcctacagcatctgcattctcatggaaatgcaatggattcattctcacgccattcatgccggagaatattttcacggaccgttcgaaatcattgatgaatctgttccatttattatcctgctcggcttagacgaaacaagaccccttgaagagcgggcgctttccttctcaaaaagatacggcaaaaaactgactgtgcttgatgcggcagcatatgatttttccggaattgacgattctgtaaaaggctacctggctcctctcgtattaaaccgggtgctcagaagctatgcggatgcgctggcggaagcaaggaaccatccgttaagccagcggcgttacatgtggaaagtcgaatattaagaacgcgcattatatttcaccggactataatgatatataacgttatagtccggtgacaaaggaggaaaagcatctgaaaaagctcatctgcctgttcgttctgttagctgtatgtctgtcagccgccgcctgttcaagccaaagcagttcctctgacggaaaagtgaccctgaagttttttcacaggtggccgaaggagccggaaaaaagctattttgaagaagcggtcaaagattttgaagccgctcatccggatattcatatccaaacggaagcggtcttaaacgattcttataaagacaaggtgaaagtcatgctcggaacaacgagccccctgatattttcttttcatggagcgaccggtttgcttataaattcatcaaaggagataaagccctcgatctgtcgtcttactatcagcaggataaagattggtcctcacagcttgtgcagtcacaaatcaaaccctttacgcatgacggaaaacagtacggtgttccgtggcaaatggacgctaaatcattcttttataataaagacatttttaatacattacatttgaagcccccggcgacatgggatgaactgatcacagtctgtgagaaattgaaagagaacggatatattccgatcagtttcggcacaaaagcgccttggaccatttctcattatatcgggacgctgaaccagcgtatggtggatgaaaaaacgcgggcgaaggattacagcccggaaaccggggagtttacggacgaaggctatgtcaaagcgcttgaaaagcttcaggaacttctgccgtactttacaaagcacgtgaactccgttgatcacgaatacgtgcgccagcagtttacgagcggcaaagcggcgatgatttatgcggaaacggcagaaattaagctcgtcgaaccggtcaatctgggcttgtttcctttcccgaaaatcagcggcgaaaagggatctccccgtgcactgaccggatctcccgaaggatttatgatttcctcaaaaacgaagcacccgaaagaagccatggaatttcttcagtttttaacctcgaaaaaaatgggagagaagctgataaaagacgtcggtaaatacagcgcggttcagggaacggcgacagaaaacaattccaccccgatccagcgcgaagccgtgcaggatatcgtccgcgccgaaacaatggtgccgtggtttgatatggatgttgacgttgaaatcgccgatgtgtatgcggcaggcgttcagcagatgctcggcggcacaatgacaccgcgcgaggtgatgaattccgtgcagaaagcggcgcgtcaggtcaaagcgtcatctgaatagaacagatttctttggagaaaggagatgaggatttctttggtcagccgaaagcgtttcattccgtatctgtttctcgcgcccgcgctggtttttctgctgttcgtttacattccgattattgagaatgtgtttttcagtctgtttgaatggagctcatttcaacccgaaaagacgtttatcggtttgaaaaattatattgacctgttccacgatcccgtgttttttacagcactccgcaacaatgtgctgtatgcggtcatatcgctgatttgccaggttggcggcgggttaattctggcggccgtgctggaagacagattggtaagaaaatggtcgccgtttttccgtacggtattttttcttccggtcgtcatttccatgaccgtcattgcgctgttgtttgattttatttataacccggaaatcgggcttttgaatcagctgctggaagccgtcggacttgatgaactgacccgggcgtggctgggcgatgaaaacaccgctatgctgtctgtcatttttgtgtctcaatggcagtctgtcggttacatcgccatgctgtacattgtctcgattcagagcattcccgctgaattatatgaatcggcgcagctggacggagccggaaaaatccagcagttttttcacattacggtgccgcagacgaaagaaatgtcgtttgttgccgtggtgatgacgctgaccggcgcatttaccgtatttaatgaaccgtatattctgaccggcggagggccgggcaatgcttcagaagtgctgagcacatttttgtataagagcgcttttacaaaggatatgatgggctacgcttctgcgatcgcgacggtggtgcttttgctgacgcttgctctgtcgcttattcagatgaaattctttaagaccggaaaggaggagtaggccgatgcttcctgaaaagacggacttgcgtcatgcccgtcaggccgtcagaacaggcggaaaaccgagaaaatggtatgtcggggaaacgtctgtgtggctgtttctctttatctacctcattgccgttgcttatccgctgttatggatggcggtcagcgcctttaaaagctcggatgagatttttgagcacagctggtcgctgccctctgtctggcatcccgaaaacttcgtatccgcatggaaccaagggatttccgcttattttatgaacagcgtcattgtgaccgtgctgacttgtctcatcaccgtatttgtgagtgcctgggcggcatacgggctggcccgttttcaatttaaaggaaaagggtttgtgctgatcatttgtcttggcggcttgatgctgacgccgcaggtcagtcttgtgccgctgtactccattatccagtcattgggactgtacaatacgtattgggcattgattcttccgtacgcagcctatcgtattccgtttaccgtgattctgatccgttcctattttttgtcgatttccaaagagcttgaggaagcggcctatctggatggatgtacaagtttcggaatatttttcagaatattcttacctatgagcgtgccgattctggtgacatcaggcattttgacggcttaccatacatggaatgagtttatgtttgcgattatttttatcgatgatgaaaatttacggacgattccggccgggctgatgcagttcagagatgcgctgcagacggattggggcgtgctgctggccgggctgacgatttctgctgctcctattatcgcgctgtttttattaatgcagagatattttatccgcggcattgcagcgggaagcgtgaaaggataagggggatgaaaagatgaaactgatagcggccggagataatgtagtagattattatcaggatcaggagacgttttacccgggcggaaatgcgttaaatgtagccgtgcttgcccggcgcttaggccacgaaacttcttatatcgggattctcggcagtgatgaagcggcggatcacgtattgaatgtgctgaaactggagaaggtgaatgccgatctgatccgccgggcatacggagaaaacgggatggcggtcgtcacgcttgatgaaagaggggacaggatatttgccggatcaaataaaggcggcgtgcaatcgcgtctgacgctcgcttttcaggagaatgacatctcatttatcgccggacatgatctgctgcatacgagcgtatacagcaggatagaacgtgaccttccgatgctgagcggccatgtgccgatttcctttgatttctctgtaaaacgtgacgaagcctatttagaagcggtctgtccgtatgtgacgtatgcgtttttttccgggagtgatttgagtgaaagtgaatgtgtgcggcttgccgaaaaagcccgcggtttcggagcgaaaatcgtttgtctgacaaggggagaacatggcgcggtgttatcggatggggaacgcgtctatcatcagccggtggtaagagctgatataatagatacattgggggcgggtgattcttttatcgccgggtttcttaccgatttcttcgaacatcaggatattcggcgagcgcttactgcggccgccgggacggctgccaaaacatgcgggggttcggagcgttcggttacgggcatccctacaggccggacggcgggaaaagcagtgaaaaaacgagaatacgataagcattgtctcgttttttatacttgttacgcataggggctgttaatggtaaacgtgacgcggtcggtatgcattaaaaacagcgaactgtatatcggctgttcttttgacataaaagcggttttgtcaatttcaaaaagcgcatccccgatatcacaagccagatagcggctttcttcctgcttggcgtatacgacatttaacagtttcgtattatgggtgggcaccacctgatagtgctgtttcaaaatgtcatgcatcgacacgccgcctttaatatgcttgccgatgtcgggaaataaactgagcggatagtgggcgatttcgaatgagagcggctggtcgtcgtgaaataaaatgcgttttaattcaagaacgggactttcggaagcgacgcgaagtttttgagcgatggatttaggcgcttcaatgatttcatgggaaaggatctggtgtttcggtttttttcccgttgattccataaattcagagtagccgttgaccgcgatgagctcccgcttcagtttagggcttttaacgaacgttccctttccctgctgccggacgagccagccttcttccacaagatcaaggatggccttcctgactgttatgcggctgacgttgtacgtttcgcacagctcattttcagtcggcagttttacggacggcgaataaacgcccttcttgatatcgtccgcgataatttgtttcagctgaatatataaaggtttcgagctcccgttatttaacaatgggacggacctcctttgtcaagtagtagtactattatatgtattatgatgttataatacaaatttgcctttcatttatgaatctgtcagaaaccccgaacatttttaacataacagaaagatgtggcggtttccagtattggaggaggtttcgaatggcatcattaacatttgaccatatcaaaaaaacatacggcgcccaatcggcggcagtgaaggattttcacttagatgtaaaggatgaggagctgctggtgcttgtcggtccctccggctgcggcaaatctacgacactcagaatgattgccggactggagagcatttctgaagggaagctttatatcgatggagacgcggtgaacgatctgcccccgaaggatcgtgatatcgcaatggtttttcagaattacgcgctgtatccccacatgacggtgtttgataatatggcgttcggtttgaagctcagaaagctgccgaaaaaagaaatcgcagagcgagtccggacggccgctgatattttggaaatcgggcatctgctcaagcggaaaccgaaggctctttcaggcggacagcggcagcgggttgcgctcggccggtcgatcgtgcgggagccgaaagtgtttctgatggacgagccgctttccaacttagatgcgaaactgcgtgtgacgatgcgcgccgaaatcagcaagctccatcagcgtttgaaagcgaccatcgtttatgtgacgcatgatcagacggaagcgatgacaatgggtgaccggattgtcgtcatgaatgaaggaaatattcagcaggccgcaagcccccatgagatttatcattatccggcgaatatgtttgtggcgggttttatcggttctccgagtatgaattttataaaaggcgtcatagaagaaagtcacgggcaatggtattttgccggttcgtccgttcgtctgcccattccgaaagaaaaagcggccgttcttgtgcagaaaggatacagcggtcaggagatgactgcggggctgcgtccggagcatttgacgcttgccggacaatcagagcacccgcctgaagcggtgtgccgcgctgtggcggaagtatgtgagaacttaggcgcggagatgtacgttcatgcggtgagcggagatgaccgcatgacgatccgccttgacggcgcttcagaggtgaaacccggcgatgccattctgcttgcggtcaatatgaaccgggccgtgttttttgatgccgacactgaaaacgccgtatattgaaaaagggagcctgatgatggggctcccttatcacttcttatgatacgattaccagatttcgtccgcccattccgggtggtcgataaacggattgcggttatgctgatagtcttcgtaaatgatttcgttccgccgtttttccttactgtcgacggggtcttgtttattccatttgagcaaaacggacagttttcccatgtaaggagctgagccgtttccggttttatcattcagctcaaggtcgggatacccgtcgccgccttcataacgcaccgccatgtaaaacagcatgcgggcgacgtctcctttgacctcatcgcgcggctcccaggaatcaccgtcataataattgcccggcgctttcgggtattctgagccgccgttatcaaaatccatgtttcctctggcgctgttcacctggacgtctgcagggcgcagatgatgaatgtccgtcccggggccggcagctgttccgaagtttccgtgtgactttgcccacacgtgttcacggttccagtccccgacgctgccgccgtttttacttttggcccgtgattcctgggtgtagagcaagatgacattgttcgggtttgccggatcttcgtcagtttccttcaatgcattccatacttggctgtaagacagctttgtatgtccgctgatgatgcggtgcagggcgctctttaaggctgttccgctttttccggaagcttctttgtaatatgtctccgtatccgcagacggagtgatgacagctgaggaagtttgcggaaaaagagttgtgccgccggcagttgaaaccgccagccggctgtacagattcgtgtcagccggcgcgcccgcagaggctgacggcgcggtccaacccaaaatgaaaaacaggcagacaatcggcagaaaccaaagtttttttgtcatgacttgccctcctttacctctattatccaaaaaataaatctaatattctatcttttttgaaaaatggttccttcggcttatgggacagaggggcggtttcttggtcaaagtatccggaaaatcattgattttttggaagatatgataatgaactcgttatgcgctccttctataatgaagatcatcttgtcagtttttcagtttaaaaggagggcatatatggaacatcagcagctttcggcggcgaatatcgggatttccgatgacatacaatggctgtctcaattcggcgcttccgcttccggcggagtgacgaggcttttatatacgaaagaatggatggacgcccagcttgccgtcaaaaagaaaatggaggcgttcgggctggaaacggcatttgacgatgtcggtaacgtgttcggccgtctgagcggcacagaatcgcctgatgaggtgattctgaccgggtcgcatattgacaccgttattgacggcggcaaatatgacggtgcgttcggcgtgctggcgggcatgctggcgatccggcatttgcatgagacgtgcgggcgtccgaaaaaaacgctggaggctgtgtcgctctgtgaagaggaagggagccgttttcccatcacctattggggctcaggcaatatcaccggtgctttctcgctttcagatgcggaaacgccgaaagacgcgtccggcatttctctgaaagaagccatgcggcagaacggcttcggtgcaggccgttatccggcgccgctgcgcactgatattagtgcctttctggaaattcatatagaacaggggcaaacgcttgaacgatcgggaaaggatatcgggattgtcaccgggattgccggacagagacgctataccgttacgcttgacggtgaatgcaaccatgcggggaccacttcaatgaaatggcggaaagatccgctcgcggcgggaagcagcatcatccatgaactcatgctctcagcggaaagacagccggaagagctccgcctgacgtgcgggaaaatgacggttgagccgaatatggcgaatgtcattccgggccgtatccagttttccgttgatattcgccaccagcaggaagacgtgctggcagccttccatcagaaactggtgtcgattattgaaaacatcagccgcagcaaaggagtcagaccctttattgatgaatatatgaggatagagccggttcaaatggatcacatactgacacgaaccgcagcacaggctgcaaaagagcagggggcggacccggagaagatcgtaagcggagcgggacatgacgcccagatgctcggcagaacctttccggcctgcatgctttttgtgccgagccgtggcgggatcagccactcgccgcttgaattcacacccgcacatcagcttgaaaccggcgtccttacgctggcgaatgtattacataaacttgcttattaacgtaaagggggaatcggcgtgccgaccagaaaagaattgtgcattccgcaaagaacgataatgacaccgggaccgacagaagctgaaccgagagtgctgagggcgatgggcgctccgatcctcggccagtttgacccggcatttaccggtatcatgaacgaaacgatgcaaatgctccgtgaattgtttcaaacggaaaaccgctgggcctatccgattgacggcacatcaagagcggggattgaggctgttctcgcaagtgtgatagaacctggcgacagcgtgctcgttccgatatacggacgcttcggacacctgctgactgaaatcgccgagcggtacggagcggacgttcatacgatcgagtgtgaatggggaacggtcttccggcctgaagagattatcggcgagatgaaaaagatttccccgaaaatcgtcgctatggtgcacggagaaacatcaacggggcggattcatccgctgaaagaaatcggggaagcgtgccgcgcccaagatgcactctttatcgtggatgccgtggccacgattggcggatgcgccgtaaaaacggatgaatggaagattgacgcagtcatcgggggaacgcaaaaatgcctatcggtcccttccggaatggcgccgattacttataatgaccggacggccgctgtcattgccgcgcgtaaaaaggtagaacggggcattgcgacagcagctgacggtaaaatgctgtccggtcatcggccggttacgagcaactattttgatctgagccagctcgaagattattggagtgaaagaaggctgaatcaccatacagaagcgacagcaatgctttatgcgctgcgggagggtgtgcgccttgttctggaagaaggacttgaagaacggttccgcaggcatcagcgccatgaaaaagcgcttacggcgggacttgcagcaatgggccttgatttattcggcgatccggaggcgaagctgcctgtcgtcacatgtgtgaagattccgccggaagcagacggcgaatcgataaggagtatgcttttgtctcaattcggaattgaaatcgccagttcgttcggtccgctgcaggggaaaatttggagaatcggaacgatgggctacagctgcagaaaggaaaatgtgctgtttgtgctggccggacttgaagcggttctgatcagacacggagttgcagttaaagccggggaagcgctgcaggcggcccttaacatatatgatctgccggctgaaaccggtatgctgtcatgagatatgaaaacgagattgaaatcatctggacttttttcccttttccccgttatactgaatggtataaaaaatgacaaatatggaatgatcatctgtttgtctggggagaaggtaagaaatcatggcgtacatggggcgattgtcaattttaatgctgaatatgtttattgcgatgcttgggatcggattgattattccgattatgcccgcatatattaccgaattcggagcgacggggagcacgatgggtctgcttgttgcggcggcggggcttacacagcttttatttgcgcctattgccggggaaataaccgacaaatacggacggcggaaactgattattttcggcattgccgcctttgccgtgtcacaattgatcttcgcctttgccggaagcctgtggcaattgttcgcatcccgccttttgggcggaatgggcgcggcgtttttaatgccgtcaatgttcgcttacattgcggatattacgaccgaggaagaacgcgggaaaggaatggggctgttcagcgcggcgatgacgctcggtgtcgtcatcgggcccggtgtcggcggttatttggttcattacggcatgtctgtgccgttcatcgtgtccgcaagtctcgcctgcttttcaacggtgctttcatttttctttctgcccgaaacgctggggcgtgaaaagcagctggaagcccgggcaaaaacggaaaaacgtgagcatctgtttaagcaaatgtcacgcgcgctcaaatcgccgttcgcgtttatgctgattctggtttttgtgctgaacttcggaattatgaactttgaatccgttttcggcctttacgttgaccataaacacggatttaaagcctctgatattgcctttattattacggctgcgggtctcatcggcgtatttgtgcaggcggtcggcgtcagttatctcgtccgcaggttcggggaaaagcgcgtcattaacgtgacgttgatcggggctgctgcaggacttgtgtggtgccggtttgcgggttcatattgggccgtttttgccgcggcaatctttttcctgacgctgacatcgctgctccggccggccgttaatacgatgctgtcgaagctcgccggtgaccagcaggggtttgccggcgggatgaacacctcattcatcagcttagcgaatatcgccgggccgtcggccgccggttttctctttgatgtaaatatggaatttccgtatatgctgggagcggccattctcgccatcagttttctggccgcgcttggctggggcaaaaagacacagacccggccgttcacgcagcaaggataagaatcaaaagcctccgggtatccggaggctttttgctgattgtcgtttattctgcggctgtctgcatctctgaaattgcagagatgcgcatagagggaaaatcatatagcaaaaacagttgttccgtatgctcaagcatggcgcgaatggaaaccggaacaggtgtagataaagtaaaaccagctttatcgcttgacgagtctgatgaatttgatctgccggaagttgatcaaaaaagaaggcagtcaggcaggcagggacaacattgagcggcgtaaatgctgagaaggaaaaagcagggttttggaacttgctgtttcgtatgcagggggagagcattctgataaaacgggtcattgaaataatacgaactgttcagtagggggcgattggtgacaacaaggagaggttatcttataaaacctctcccggaagatgttgtgatggttctcctgcatgaattttgcagattaaaacccgcaattaggccaacacacaattatgcaagagacaatcatctaaaaaggatgtcggtaagtacaatatggtgtacggaaaaggagttgaaaatgttgtattattacccgtcattccatttgtatcagcggcaagaatttaattattatccatgggcccatcaattgactcattcagggggctccccctatgtttccgcgcgccctcctttttataattccccatgttacagagagtgcataagaagcggagcggatagttatttctgctgctatatctgcggtttctgttaaaaagaaagacttatagaagtaagtgatctttccaggatgacagtgagaccattatccagacagccattagccaacacacgaagctttattacggttcacggaggggaagcgcccctcctttttcagaaattttataaaatccccttgcgcggcctgtcagaagcggtttttggtcttgatgtgttcgactgttggtgttgacgaagaattcaagataccaggaagcagcgaaacctgtatgtatccgcgagacacaaagctttccgccgctgagcgggttcattgtcactgcgttctgtctcctgtagtagataacgagattttggggctgtcagttgaggaaaaataaaaaattcaaaacgtcgcaatcgtttaattaaaaagaagagatagaatctatctcttcggattattactgaactacaaaatggtatcgggttttccaagtggaggaatcatcatagaattcaatccaggcttctcctttagcgactgcaaatacctgaatggttttgtagtcagtacctaaagctctccatgtcacagcaggagggttataacccgtaggattaaaggaaatgcgattaccagaagtagaataattccttatctctcctacttttaaattgacgcgggtttcagactgagattgaaacaaattcttattcactttagtagagggaccggcggctgatgctgaagagttaaaaaaaggcgcgaaaacgaatgaaacaattgcaagtgataacaaagcatttttagctagtttcaacgtaaaacctccttttggtatttataggataacagtaacacttaatggaaatataacaatgaagaaattgttaaatattctttgaaatgagtgaacacatgccaagtgaattgataaatgcaaacatcatacatgtttcttacgtagataaggctgctaatcaaaagcggtttttttatgaaatcagaaaaggaaaagcagcatgactttcagggcggcgtggggaagtggttgagtcttgtgtcgctccccgctgattttcaaatgaatggcgaaaccatcaaaaaagggtcatgggtgcttgtgacaaaggttccgaggcagtttaggatgaaatcaaaaagggtgagattatcggttgcatcctgaatatcgaaaaagcctgatgatatcaatggcagcattttttgagggtttagctgaatgaatccccttaaataggatgcgggagaacacccgcatcctggtctatggctaaattttaaccgatcagccgctgcattctcagcgcgagccgcaggcgcatcgtcgtctccggatcttttaagcttttgccgagcagttcctcgcatttttctaaacgatagatcaccgtatttcgatggacgtacaggcgcttagccgtttctgaaatctggcagtgggtttccaggtaaacagacagtgtatgaagcaggctctggtcctccttttgccggtcggccaggctttggagggtggcttcgtaaaactttttcacatcttccgccggaagcaggccgagcaactccggcacgtctttggcatgatagatttgaataaactccgcgcttctggacaaatgcccggatgaaatggcgtctgaagcttcagtaaaagcgtcagggacatcgatcagcttttggcatatgtttgagatgccgaaggagacagtccgtttaaactgcgtccggacctgtttctgaaactgctccaaaaagctgatgacagacgcgtgcatttcattccagctgtctgtcgcttcaattaaaagaataccgacatttcctttaataaagagatgagggggaaacggaaaggatgacagctccccttcaagcagatcaaatacatgatcggaaacgagctgattttcggtaaagctgatcgttttctcatttcggtcgagttttccgcaaatgcacatgtatttctgatcccagcggagccggaattctttggcacggcttttgatttcttcatggccggtaaacgagcggtcgatgaaattgctgaaaaattcattgcgcgcccgtctgccgaattgtttgacggcattttctttcagcagttcaaaggaaatgacgttggccgcctgttcaattgtcaaaatcatgcctttatcagcggtctgcaccagctccggaatcaccagataaccgcagtttttttcaacattcagaatcggcaggacagaatacacctttctgtcggagagcatggaaaagcaggtgaaataaggaccggaaagggaataacagatgtttttcaataaagacgtgtcaatgggtatgctgtgggacgatgataagagttttgtatgctgatccaaaagcagcacgggaagccggagaatgtctgagagcttcttaagcagggattgcagccctttgccgctcatgatgtggtttgtaaattttttatgggcgtaaatggcctgctgcagctcatttgaacgcatatcaagaatatggctcaatgtagcattgacgatatctcccagcctgatgtcttccggcagctcaataatcggaaattcataccggtcggcaagctctgcggcatctttcggaatgacattaagatagcgcttcgttttgatccccagtcccgcgcatccccgttttgccatgaggcggattaaatctttcaacagctgcgggcggtccttcaagtggtaagccgtcgtgacgagcaattcgtttttatgtaaaaaatcagcgatgtccggcgcatccatcatgttgacgtgctgcacctccctccagccgccggatctgcctgcgattaatgcggcccgctcataagcgggaatcttcatcacatcataaatattcatcagtcaatctcctttcaggttctaaagacaaccattggttaatatgaataaaagtcatcaaaaattatagcggttttgctgatgtattacgatcatagtagcagtaaactggcaatcatagacgcatgttgtgataaaaactgacagaaaatcgtcatccttacagggaggaagataaaatggcctatgacgtaattgtaaagggtgcgaaagctgtgcgaaaaggcgggacagagcgggccgatatcgccgtcaaggacgggaaaattgcattgatcgagcccggcattgacgaaaacgcggaacaagtggtgcaggcagacggcatgtatgtgtttccgggcgcggtcgattgtcacgtgcatttcaatgaacccggacgcgaagaatgggaaggcattgaaaccggctcaaacatgcttgctgccggcggctgtacggcttattttgacatgccgcttaactgcattccttcgacggtaactgctgaaaacctgctggcaaaggcggaaatcgccgaacggaagtcagcggttgattttgcgctttggggcggtttgatgcccgggtataccgaacatatccggccgatggcagaagcgggggcaatcgggtttaaagcgtttctgtctaaatcgggaacggatgaatttcaatcagccgatgaacggactcttttaaagggaatgaaggaaatcgcggcgtgcggcaggattttggccctgcacgcagaaagcgacgccctcacccgattccttgaagccgagtacgcgctccaagggaaaattgatgcccgcgcttacgcttcctcccgtccggaagaagccgaatgcgaggctgtgcagcgggcgattgaatatgcaagagcgacgggatgcgcgcttcattttgtacatatcagcacgaaacgggccgtgctctccattcagcaggcgaaaaaagacggattggatgtcaccgttgaaacgtgtccgcactacttattattcagctttgaagacttcctcaaaaaaggggcggctgccaaatgcgctccgccgctccgctcagaggctgataaagaggaattgatcggggttttggctgaagacctgattgatatggtgtcttcggatcattctccctgtcatccggctttgaaacgcgaggataatatgttcctgtcgtggggcgggatcagcggaggccaatttacgcttctcggcatgattcaattagcgatcgatcatgggattccgtttgaacatgtggcccgatggacggccgaagcacctgccaagcgtttcggtttaacgaataaaggccggcttgaagaaggatttgacgctgattttgccattgtccggccggaaccttttaccgtcacaaaagaaacgatgttttccaaacataagcaaagcctgtatgaaggccgcacctttccataccgaattgctgcgacctacagcaaggggtgctgtgtgtatcaggatggcggtcgtaagcagagcgggtctttcggaacattcctgaagccttgtgaaataaaaaagccgattctctgatgagaatcggctttttttgtcgtttggaaagcgggtctcgtggtatctttttataaaaaggagtaaaacacattgtatgatcaaatcttgaacatattaacggcatcctggtcgcgcaagaccagtacaaaatggacggaagattgcccggccacaggccagtgcggcgtgacggctttagtcatccaagatgtttacggcggtgacattctcaaaacaaaaaccggcacaagctggcatttttataatcgaatagacggggagatatatgatttcacgagcggtcagttttcagagccgatcgtctatcagcatattctttcttccagagatgaggcattttcggacaccaatgaacatcagtaccgttacctgcaaagtgcattcagaaaaaacatggaaacggaaagagaaaaacacctgtgataaactagaatgagaggtgaaggattgtgatttatatcggactgacggggtggggggatcatgacagcatctatccgcctaaaacagcgggcccgcaaaaactgcaggcgtattcctcccattttcccatcgttgagctggacgcgagcttttacgcgatacagcccgcccgcaataacgaaagatgggtcaaagagacgccggaatcttttcaatttgtcattaaggcatttcaaggaatgacgggccatcagcgcggtgatattccctttgaatcgaaggaagaaatgtttgaggcgtttaagctgtcattatcgccgtatatagagcatggaaagcttgccatggtgctgttccaattcccgccgtggtttgactgcaagaaagaaaacgtcgcatatttaagatggtgcaggaagcagatgggcgatatcccgtgcgcgcttgaattccgcaaccgatcttggttttccccgccattttacgaacagacgctttcctttatgaaggaggaaggctggattcacagcatatgtgacgagccgcaaatcggcgagggcagcattccgaccgtcctgaaagcaacggatgaagaaaaaacgcttgtccgttttcatggacggaacaagcagggctggatcaaacctgacggcggacaaaactggcgtgaggtcagatatttataccgctataacaaacaggagctcaaagattggaaaaacaatcttcaggagctgaaaaagcagtcgcgcaatctgtatgtgctcttcaacaataactcaggcggagacgccgccgataacgggcttgagatgcttgaaatgttagatatctcatataccgggcttgctccgaagcagctcgacctattcagctagaaaagaggtttcaagacacatgtcttatcttattttgattatattgggatttatcgcgggaacggtcggcagcctgatcgggcttgggggaggaattatcatcgtgccggcgatgctctatttaagcacgatgaccccgtttttccatgacgtaacaccgcagactgccatcggcacgtcccttttggtgattatttttacgggcctgtcatcaactctggcctatatgaaatataaaaccgttgactacaaaagcggactgatcttttttatcggttccggcccgggaagcatcatcggcgcgtatttgtctaaactttttaatgcgcatacgttttccgtctggttcggactttttatgattttgatttctattacattaatgctgaaggcgaaagcaaaaccggtcaataaagcgcataaaggcatgatccggacatatgaggatgaaacgggtgagctttatacatattcgtaccgtatttttaccggtatcgccattgcctttttcgtcggtttattgggcggtcttttcggcatcggcggcggctctcttatggttccggccatgatgctgttatttttgttcccgccgaaagtggctgtggcgacgtcaatgctcatcattttcttatcctccgtgacgggttccgtgtcacatatcgcagagggccatgtcaattggctgtatgcgctgtgcctcgttccgggcgcgtggttcggcgggaaaatgggcgcgtgggtcaataagcgggtgcagacgaaaacgatcgtgcttttcatgcgggtcgtcttgattttgatcggctgtgaattgatttatcaagggatattcagctaaaaggtaggagagatggtatgttagagaaactccgtttatatcatacgaatgatttgcacagccatttcgaaaattggccgaaaatcgtacattatattgagcagaagagaaaagagcatgaaaaaaacggggaggaaacactcgtattcgacatcggcgatcatatggaccgatttcaaatgataacggaagcgaccttcggcaaagcgaatgtcgacttgttaaaccggcttgagatcaatgcggctgccgtcgggaataatgaaggaattacgctgcctcacgatgagctggcgggtttatatactcatgccgcgtttcccgtcattgtgtccaacctgtttgacgcggacggacagcggccggaatgggccgagccctacgtgatcaaaacgctgaaaaacgggatgaccgccggcatactcggggtcacggtgccgtattatcccgtctatcagaaactcggctggacggtgacggatgcggaaaaaagcattcaagaatcacttgacgatatcaagggcaaagcggacatcatcattctgctttctcatttaggcctgatcgatgaccgggccgcagcggaaaaatttcccgacatcgatgtcattcttgaatcacatacgcaccaccttcttgaggacggacaggatataaacggcgtattgcttgcatgtgcggagaaatacgggaactatgtcggctgtgtcgagctgacgatagaaagtgaatcacgaaccattgtcagcaaacaggcatctgtacagaaaatggctgattggcacggggaatctgaagatacggcggcttttctgaaagagaaagaacgggaagcggaaaacctgctctccgtacaagtcgccaatctgaatgaagaagccggcgtgaagtggtttgaggaatcgccgctcccgcttctattagccgaagcgctgaaaagctggtgcggctgtgaagtcagcatggtgaattcaggcgtcattttggggcctttacagaaggggcctgtcacaaaacttgacttgcaccgcatctgccctcatccgatcaatccggtcgccgttcgtctttcaggcagggaactccgggaaacaatcagccaggccgcctcggaacaaatggagcagctgcggattaaaggcctcggcttccgcggggaagtgatgggcaggatggtatatgccggagcggaggcagaggccggcatccttgaagacggtgtgacgcatctcctcaatgtgaaagtgaacggagaagaggtggatccggagcggatatactcggttgccgttctcgacatgtttacactcggaaagctgttcccttacatccgcgattcaaaagaaaaacaatattttatgccggagtttttaagggatctgctcgcctggaagctcgcgcggcaagcgtaatgtcaaatatccgccggccgttccatctcacccgaatgaaggtaagcgggactttttaagagcaaaaataaaatactatgtcccctcttacaagcatacattgtgatatgtaaggggggatttttcttgcctagataccggagcgctcttcgcaagagagggcctttgccttttcgatatgtgcttcttctgtcgtttgctttttttatcatatcgacggtcatcagcctctggatgatcaactcctcaatcaaaccggtgctgatgaacataggagaaatggaaaccaaacgggtggcgacagaggtcattacggaatccattgaagaatacatgtctcacagcgacaatgtgaaagatatggtcgatatgaaaacggatgaaaacggaaaagtcacaacgatggattttaatacacaaatggtcaacagcatgaaggcgaaagtgacaaagcagcttcaggctcatttgaaggaagcggagtcgaacaataagcagcatgaaacggaaaaaggcgcgaaaacggccgatgaaattatgattaacatccctttagggcaggtcacgggaaacagcgttctcggaaatctggggccgaaaatccccgtgcgctttaacctgatcggtgatgcgttaactgatgtgaaaacaaaaataaagccgtacggcattaacaatgccctgatcgatatcagtatttttgtggaaattaaagtgaaggtcattattccgtttgccagtaagacatcagtcgtcacaaataatattccggtctccattaaagcgattcaaggagaggtgccgcagttttataacggaagcggcggatcaggtgtgacgccttctgtccagctgccgagtgaaaaacagaagaaagataaataaaaacacacagccgcaatctttcctggcggctgtgtgtttactttttcctgcggatttcttttcgctcccatgcccttaaatggggatacgggtcaaaagaccattccgatctgccgttatctttatacatcccgtagtgaagatgcggcggaaattttcccgcggtgcccggcggtccgtatccggaactgccgacagagccgatcacctctccgggtttgacgatctggcctttatgcacaccttttgcaaagccgttcaggtgagcgaagtagtgatacgtgttattgatatccctgatgccgattctccagccgccgaaacggttccagcccttcatttcaacaataccgtagcaggtcgatctgacggggagtccgtaatgagcgaacagatccgttccttcgtgaatccggcgcccgccgaaaccccgtgcggcgccccatgtgctgcggtagctgtaatccgtcttcacgggaagcggaaaagcgtgctctccgagatcaaggcggccgaacgttttaaacagtgtcatgaattcggtgataatgccgaccgtctgatcacggcggtaataattccagaggccgatgcggatatggtcaagatccgttccgaatcccgctaaatactgtgcaaatgtataaaggatatcctcatcattgctgacctcggcttttccgtcgccgtcgccgtccaggccgatcccgtcaaatactttaatgctgaggggcgcctcgtccttaggatttggattttcaggcccgctccacaaatgatccggaatataaatgctgatgattcccgctttttccggcagatcctttcggttcgagcggacattttcttcatattgatcaaccgccgcaagcacataccaaggaatctgcgtgactgcttcggctttgcggtacaactgcatccgttcaccgtaaacaggagccgattgttctttcccgcttgcagccggacagaaaactgataaaaggagaagagcagataacagaactttcacaacatgatctcctttcaggattaatacaactagtttgcggcaacaatccgagaaaatgtaagtaattctcttcccttgtcgagaaatttttcctatgttaaagtgactattgaatagaaatctgcaagttttatatccatcgtgaaatagaaatttttcgcacacgaacatgaataaagggataatggagatgatggggaaatggcaaagaaagacgagcatctgagaaagccggaatggctcaaaataaagctgaacacgaatgaaaactatacgggtctgaaaaaattaatgcgtgaaaataatctgcataccgtatgtgaagaagcaaaatgcccgaacatccatgaatgctgggctgtcagacgtacggcgacgttcatgattctcggttccgtctgtacgagagcatgccgcttctgcgctgtcaaaacgggtctgccgactgagctggatctgcaggaaccggaacgcgtagctgattcggttgcactgatgaacttaaagcacgccgtcatcacggccgtggcgcgtgatgatcagaaagacggcggagcaggcgtctttgcggaaacggtccgggcgatccgcagaaaaagcccgttcacgacaattgaagtgctgccatccgatatgggcggaaattacgacaacctgaaaacattaatggatacccgtcctgatattctgaaccacaacattgaaaccgtccgccgcctgacaccgagagtccgggcccgcgcaacatatgaccgttctttggaattcttgcgccgtgcgaaagaaatgcagcctgacatcccgacgaaatcaagcattatgatcggtctcggcgaaacgaaggaagaaattattgaagtgatggacgacctgcttgcgaacaatgtcgacatcatggcgatcggccaatacctgcagccgtcgaaaaaacatttaaaagtccaaaaatattatcatccggacgaatttgccgaactgaaagaaatcgcgatgcaaaaaggcttcagccactgtgaagcaggcccgcttgtccgttcttcctatcatgcggatgaacaagtgaacgaagcgtctaaaaaacgccaggcccaagcataagataagccgaaaaaacccaaaacgccgcaggttttgggttttttgtgatggagccgtctgtgcagggaaaaagtcattcttgaataaggatcgtcagaaccgctacactggatataaaaggggaaaatttttccgtccgtccgaaccgtctcattttgcaattgatggacagaagtcaatgaattatgatagtaaagagtgataaaagaggtgaagacatgattcttattcaaaatgccgagtttgaactcgtacacgattttaaaaacggctttaatgaagaagcgttcaaagcccgctattcggacatattaaataaatatgattacattgtgggagactggggatacagtcagctgcggctcaaaggcttctttgatgaccagaatcaaaaagcaacctttgaaacgaaaatcagcacattggacgaatacatttacgaatactgcaatttcggctgcgcgtattttgttttaaaacgaatcagaaaataattgatgcagaaggggatgctgtcacgtgtattttgttgacagaaataatatcgaacaaacactccgtttttttgagacccagctggcgctgtttgacagcacgcctgcatggcagagcgaaatcgaaaaaagggcgcttgagcggatcagccatcttatgatcgaatgcattctcgatgtcggaaatgatatgattgacggctttatcatgcgcgatccggggagttatgacgacatcatggatattctgacggatgaaaaggtggtagctgaggatgaagcgaataagctcaagcagctgatctcttccagaaagcggcttgttcaggaatatcagcaagccgatcatcaggagctgtttacgctgatcacgtcaaacagggacgtgctgaaagcctttccggcccgtgtaagaacctacctggaaacagaattagggcctgtttccgcatttaaataacaacgagtgagaaaatccacaggagtgttgagtatgaaggattataaaggatatttgatagatttggacggcacaatgtacaacgggacggaaaaaatcgaagaagcgtgtgaattcgtgagaacgcttaaagcgcgcggcattccgtatttattcgtgacgaacaattcttcccggacgccgaagcaggtggcggacaagctgatgagctttgacattccggcaactgaagagcaggtcttcacgacgagcatggcgactgcgcagcatatcgcccagcagaaaaaagacgcgtcggtgtatgtgatcggcgaagaaggcatccgccaggccattgaagaaaacgggctgagcttcggagaagaaaacgcggactttgtcgttgtgggaatcgaccgcggcattacatatgaaaagttggcaacgggatgccttgcgatcagaaacggcgcccggttcatttcaacaaacggcgacgtcgccattccgactgaaagagggcttttaccagggaacggttcgctcacatccgttttgacggtgtcaacgggcgttgagcctgtctttatcggcaagcctgaatccattattatggaacaggcgatgcgtgtgctcggaacggatatttccgaaacactcatggtcggcgataactatgcaacggatattatggccggcctcaatgcgggcatggatacgctgctggttcataccggagtgacaaagcgtgagcatatggcagattacgaccggaagccgacatatgcgattgactctttaaccgaatggattgaacatctataaaaaagggacggccatgacggccgtccttattctgtatttctggcgctgtgggcaagccggcttgaagccgctgctgcgattgcgccgacgatatcatcaagaaacgtatggcattcccccgtagatttatcatttaaccgcccgagaatgccgggtttttctttgtcaatgtagccgtaattcgtaaagccgattgagccgtatatattcacgatagagaaggcgagcacctcgtcaaccccatacaggctttcatcaatcgccagaatggtctgaagcggttcagacagttttttttgttcggcgagcacatctaattctattcccgttaaaatggcgttttgcacctcgcgttttgcgatgacacggtccacattgagcctgcatacttccatcgtcaaatcaggatgatattttttctgaaggaaatacaccagctcggcaatatcgtccgtctcaaccccccgttcttttaaacgcgctctggcgacagcttccacctgattcagttgttccttttctgacatttgcttcacccaatctttttttactagtttatacaacacccttccgatgtgtacgatgtttctccacttgattcaaaggattacaatatgtattcataattccgccggcgtatgactacgatgtgaatagctctaatttttcaggcaggtgattatgatgaaaagcatcattaaagaaaagtacggcatccacgtcagacagctttccgtttatcagaaataccaatgcttccagacgcctaattccttctttcttattattcccgtttccgggttttcgcaatcagagctgacggagctttactacatgagtcagtatttacaagaacaaagtgacccatacgtttcagtgtttatctttacgaaggaaggagaactgacctttgaggacgaaggcaaaacgtatgcgctcttaaaagcgccgatccccgtcgcaaaccggtcgttctctgtcggaggggagcttgccgaatttcacagaaaagggcggggttttccgtacgaagtgaaagaagcgggcaggatcggccaatggaaggacttatggggaaaacgggtggatcagctggaatcattctggatgcagaaaattcatatgtctccgcttgaaccgttcgaaaagaaaatgatcgaagcatttccttattattcaggcttagcggaaaatgcgattcaatatttagtggatacggagctggatgacaatcccggcgcagaagactcggggacaatctgccatcagcggatggaacgggatacctggtcggaggaatcattgatccgcattccgggcgattgggtattcgaccatgccgcccgtgatattgcggaatatatgcgcagcacatatttgtatcatcgtgacgacttgcttaacgaagggtttttgtttttgcaggaatatgagcaagttacgccgttatcctccttttccaagcgcctgttttacagccgcctgctgtttccgcttcatttctttgagacggtggagagttattacatttctcatgattctgaaaaacagttttacgaagagcagcttgactacattcttgccgactgcacccgctatgaacagtttttacagacatgtcacgacatgatgaatgtcaggtcggcgcaggtttttgtcccgcctgtggcgtggctcggaaaaggaatcagttcgtaagaaaatataacgtaaaaatatttagaaaatagggaatcttgtcatatcaatgtgttaagcgttttcatggccgtagaaacaatattcagccgcttgtcaaaacaaatgcgggcttatataatatttgtaacttaaatgtctgtgaagggttaacaattgtccttttctagtggacaaaaggaagaaaggtggagtttctctttggaagcgattcgtattggactgttaggactgggaaccgtgggaagcggagtcgtcaaaattatacaagatcatcaggataagcttatgcaccaggtcggctgtccggtgacgattaaaaaagtgctggttaaagatattgataaaaaacgagacgcagacctgccgaaagaagtgctgacgacagaagtctatgatgtgatcgatgaccctgaggtcgacgtgattattgaagtcatcggcggtgtcgaacagacgaagcaatatcttcttgatgccttgaaagcgaaaaaacatgttgtgaccgcaaataaagatctgatcgccgtatacgggtcagagcttttagccgccgcaaaggaaaatggctgtgacttgtattatgaagcgagtgtcgccggcggaatcccgattttacgcacgctcgaagaaggcctttcctctgaccggatcacaaaaatgatgggaatcgtcaacggaacgacgaacttcatcttaacgaaaatgattaaagaaaaaagcccgtatgaagaagtgctgaaggaagcgcaggatctcggattcgcggaagcggacccgaccgccgatgtagaaggactcgatgccgcacgcaagatggcgattttagcccgtctcggcttctctatgaacgtcgatctggacgatgtcaaggtaaaaggaatttcccggattacggatgaagacatcagcttcagcaaacggctcggctatacgatgaagctgatcggcatcgcccagcgtgatgacaataaaatcgaagtcagcgttcagccgacactgctcccggatcatcatccgctctctgccgtgcataacgagtttaatgccgtttacgtgtacggagaagccgtaggcgaaacgatgttttacggcccggagccggaagcatgccgactgcgacatcagtcgtttccgatctggtcgcggtcatgaaaaacatgcgtctcggcgtaaacggaaacagctttgtcgccccgcagtttgaaagaaatctgaagcagccgtctgatatctacgcccagcagtttttaagaattcatgtcaaagaccaggtgggctctttttcaaaaatcacatcggccttctcagagcgcggcgtcagctttgaaaaaattctgcagctgccgataaaaggacatgacgatctcgcggaaatcgtcatcgtcacgcatcatacatcggaagaagatttcagtgacattctgcaaaacttaaatgatctagaagttgtacaagaagtaaaaagcacatatcgtgtagaagggaacggttggagctaatgtggaaaggactcatccatcaatataaagaatttctgccggtgacggatcggacgccggccctgacattgcatgaaggcaacacgccgctgattcacctcccgaagctttctgaaaagctcggaattgaactgcatgtgaaaacagaaggcgttaatccgacgggatcttttaaagaccgcggcatggtcatggcggtcgccaaagcgaaagaagaaggcaatgataccatcatgtgcgcctcaacaggcaacacatccgctgcggctgccgcatacgcggcgagagccggcatgaaatgcatcgtcatcatcccggacgggaaaatcgccttcggaaagcttgcgcaggccgtcatgtacggtgcggaaatcatcgcgattgacggaaactttgacgacgcgctggccatcgtccggtcgatttgtgaaaaatcaccgattgcattagtgaattcagtaaacccttaccggattgaagggcaaaaaacagcggcctttgaagtatgcgaacagctcggcgaagcgccggacattctggcgatcccggtaggaaatgccgggaatatcacggcctactggaaagggttcaaagaatatcatgagaaaaacggcaccggacttccgaagatgcgcggttttgaagcggaaggttctgcggctatcgtccgcggcgaagtcattaaaaatccagaaaccgttgcgacggcaatccggatcgggaatcctgccagctgggacaaagccgtgctcgctgcggaagaatcagccggaaaaattgatgaagtcacagatggagaaatccttcacgcttatcagctgattgcccgtgaagaaggcgtatttgccgagccgggctcctgtgcatccatcgccggcgttttgaaacaggtgaaatccggtgaaattccaaaaggaagcaaggttgtcgcagttttgaccggaaacggcctgaaagatccgaatacggctgtggacgtatctgacataaaaccgatcacgctgccgacagatgaggacagtattctggaatacttaaatggagcggcgcgtgtatgaatgaggcggagatgctgttttccattacggttccgggaagcaccgccaacttaggacctgggtttgattccatcggaatggcgctcagcagatatttgaagctttcggttttccgaaacgatgaatggcagttctcggcggaaaccgaaactgtcgcgggcatccctcaaggaacggacaacctcatctaccaagtcgccaaacggacggctgaccgctatcagaaagagctgccgcccgcccatgtcaaagtttggagtgacatcccccttgcgcggggtctcggaagcagcgcggccgctatcgtcgccgccattgagcttgcggatgagttatgcggcctgcagctgtcggaaagcgacaagctgcacttagccagtcttgaagaggggcaccctgataatgccgctgcttcccttgcaggagggcttgtaatcggccttcacgaagaagatgaaacacatatcgtgcgtgttgccgaagcggatatcgatgttgtggcagtgattccgttttacgaagttctgaccagggacgcaagagacgtgctcccgaaagagctgccgtaccgacgcgccgttaaagcaagcgccgtcagcaaccttctcgttgctgcgatcatgtcaaatgactgggcgctcgccgggaaaatgatgagaaaagacatcctccatcagccgtaccgcgccatgcttgttcctgagctttcaaaggtggaacacgcggccgaaatgaaaggcgcttacggaacggcgctgagcggagcgggaccgacgattcttgtcctgattgaaaaaggaaagggagaagagctgagaaaacagctttctgagcatttccctcactgtgagattgcggcgcttaccgtcccgtcagaaggaagcgtaattgaacggaatcctttagagcaggtgaaaagtgtataatgataaaaaagcgttcttcccatcagagaaggacgctttctttttctggagaaggatttttatttagggaagcgaaataaaaaagaaaaggaggagatacgattgaaaaaactcataaccgaggaggacattgcgtcactcgtatccgtgacagacccgcaatatgcccctgacggcagaagagccgcttacgtccggacaacagtcaatcataagcgtgattcctattcctcagccattatggtatatgacacagaatccggcatctcaaacccgtggactttcggggacgataaaaatacaagtccgcggtggtcgcctgacggtcggcgcctcgcctttgtttctgacagggaggacggcatccctcagctgtacatcatcgacgctgccggcggagaggcggaacaggctgccgatattccttggggcgtatcagatccgatatgggcgcccgacggcagatccgtgcttgtgtccgtcagtctgacatcagcggagcgcgccgatgagaaagaaaaaaagaagcatgacgagtatgagccggttgagattcaatcattaacatataaacgtgacgggaagggcctgctgaacggaagccggacacagcttgtgctgattcatcttgaaacgggggagattcagcagctgacagatcatgaagctgatcattatggcgcggccttttcaccggatggcaggcagcttgcgtttaccgccaatttatgcgagccgggtgacgccggaaagccgagcgatgtctatctgatgaatctggcggacggaagcctgaagcagattacgccgcaccgcggttctttcggttcctgcgtgttttcaccggacggttcttatatcgcgatgctgggccatgagaatgaatttcgcaatgcgactttagagaaagcgtggctgtacgacgtgaaaactgagcggctgtcctgcctgaccgacatgctggatgttcatttgagcgatgcgctgattgcggattcaatcataggaggagtgacgccccggccggtatggacaaacgacgggcagggcttttacgttctcgggagcgagcagggaagcaccggtatttattatatctcgattgacggcctcgtatatccgatccgattagaagaagagtacgtgaacggttttgcttttcatcctgatcagaaaagctgtatcgctgtcattgccaaacccgcacagccttccgagctttacagcatttcacttgaaaatggggaagagaggcaattgacattttacaatgatcggtttatagaggagcgtatcatatccgtgccggaaaagctgcaatatgaaacaaaggacgggctgacggtaaacggctggtttttaaagccttccgtttttgaagaggatcaaacatatccctcattctatacatacacggcgggcctcacatgatgtacggccatacgtattttcacgaattccaagtgctggccgcacaaggatatgctgtcgtgtatgtcaacccgagaggaagccacggctacggacaggattttgtcaatcgtgtcaggggtgattacggaggcggagattaccgtgatgtcatgcaggcggtggatgaagccgttcaggcgtatccgtttttagacagcggccgtctcggtgtgacgggcggaagctacggagggtttatgacgaattggattgtcggacagacaggccgttttaaagcagccgtcacgcagcgctccatttcaaattggttcagcttccacggtgtcagcgatatcggcttcttttttaccgactggcagctcggacatgatttgtttgaggaagcggataagctttgggatcgttctcctgtaaaatatgcatcccgcgtttcgacgccgcttttgatcctgcacggtgagcgagatgaccgctgtccgatagagcaggcggagcagctctttaccgcgttgaagaaactgaacaaaacgacgtcgttcatccgatttccgaaagctacgcatgagctgtcgagaagcggccatcccgaacagcggatgaaacgcatccgttatatttgttcatggtttgatgactatttgtaaaaataaaaaaaccaggctgtcatgcagcctggttttatgattaaaatacttgttctacttcaacgacacccggtacttcttcaagaagggcgcgttcaattccggctttcagcgtaatcgttgaacttgggcagctgccgcatgcgccaaggaggcgaagctttacaatgccttcgtctacatcaacaagctcacagtcaccgccgtcacgaagcagaaacggacgtaatttatccaatacttcctgtacttgctctttcatttcaacctcagtcatgagattcgctcctttcatatacataaaaccattatattcacagtaacggtaaaaatctaatgtttggtttgcaaagctgctttctccattatagcatatttaaacttgaacataaaaaccgttttttatacaaaagctgccccgtcctttgtatactggtgtaaaggggatgatatacatgacaaagccggttacgctcagtgtttacggcgctgaaacgctttgcgcaagctgcgtgaatatgccgagcgccaaagatacgtttgaatggctggaggcggcgctgaaacggaaatacccggagcagccttttaacatgcggtatattgatattgaggcaccgcctcagcaaaaggagacagaagagcttgcggagcgcatcaagaacgatgaatttttctatccgctcgtgctggtggaggatgtcattgtgggggaagggaatccgcatttaaaagatatatatgaagaaatggaaaagcgcggctatgtggcgggctcttaaaaatggccgctgatcgcaatcagcggcttttttcttatcagccgttatgatgcttgtacatccataaaaggcctgattttaataaacggggcacacgcccgatgagcggacggtcgttgacaagaccgaagcccgctttttttccgagtgaaccgaggacgcctttcagcttaaattgcggcattgtttccggcagctcttcattgttccagcgtttcaggaggatctgcacaatttgttccgcctgcgcttcagccagctgggcgctcggcgcatgcggcaggctcgcgcaatcaccgacgacgtaaacatgctcatcgcccggaagattgtgatgcggtgttaaaacgatgcggccttgcgggtctttttcagcgtccagttctctgacggctttattcggctgaattcccgccgtccacacgatggcatcggccggtattccttcatcatgattataaacgatgccgtcttccacttttgtaatattcgcattattgataatggtgacgccgtgttcttcaaaccatttctgaacgtacttgctgagtcttttcggaaagcttgataaaatcaggtcgccccggtcaaataacataatcttcagatcgtcacggctctctcttaattcactggcaagctccacgccgcttaatcccgctccgacgatagcgacagatgcattggcgccgaggttgttcagcttttgataggcttcgcgtgactgatcaatggtctgaatgctgtaagtatgttccggcgcgccgggcacgttatgatacttatcctcacagcccagtccgatcaccgcgtcatcgtaagaaatcggttcgcggtcatgaaacagaacctgtttgtttttcgtgtcgatggaagccacctcaccgtattgaacatccagattcggatgctcaggaaaagacaccctgatatgatgatcagaaatcgtgccggctgcgagcgcataatattctgtttttaagcagtgatacgggtttctgtcaatcagcgtgatggatacatctgacggaagctggttcggcagtaagcggtgcagcacccgcatgtttccgtaacccccgccgatcaagaccaattttttcataatgattccccttttgcccgaaaaatatggtagtcaatattgttacaaaataacgaactatgtaaaataacatctagaattatatcgaatttgatctaaaaccacaataatagttttaaaataacctacaaattgaccagaaaacacgcaatagtaaaacctttaacctgaattaatatgttacgataacattgagcgtgaaaccggatctttgacgaatagaggaaattccgttaggataaggtacatatgtgaggtgaaaccgcatgaatccgatgattgaattctgtgtcagcaatttagcgcgcggttcccaggaagcacttgagatcttagagaaggatccgaacttggacgtgcttgagtacggctgtttaagctactgcggaaaatgcatggagtccctgttcgccctggttaacggcgaagtggtcacggggggcacgcctgctgagttggttgacaacatatatacattcatagaagaaaatccgatgttttaatcagaggctccgaacggggtctcttttttattgcgcccgggttttggcaaaataaaaaatttgtagacagcaaaaataaatattgttatcttaataaagactttttttaaataaaattttagaggtggattcattgaatatcgtttgggggctgctcggggcagttgctatattagccattgcttttttgttatcagagaagaaaagcaaaattaacctgcgaaccgtcattgtgggtttatgtttacaaatggccttcggattcatcgtattaaagtgggacgccggccgggccgtatttttatggttctcaagccgtgtgcagcttctcattgattatgcgaacgaaggcatcagctttatttttggcccgctgttaaaagtgggcagcagcccggctttcgcgctgagcgttctgccggtcattatctttttctcagcgctgattgccgttttgtatcacttgaaaatcatgcagctcatctttcgcgtcatcggaggcggactgtcaaaacttcttgggacaagcagaacggaatcgcttgcggcggctgcgaatatttttgtcggacagtctgaatcaccgcttgccattaaaccgctgattgcgggattgacccgttccgagctgtttacgattatgacgagcggcctttcggctgtagcgggttcgacgcttttcggttacgccctgttaggcattccgattgaatacctgctggcggccagctttatggcggctcccgccggtctcgtgttcggaaaaatgttaatacctgaaacagaaaaaacgcagacgataaaaggcgattttaatatggacgaagaaggcgaaggcgccgctaatgtgattgatgcagcggcaaaaggcgcatccacgggccttcagattgctctgaatgtcggcgccatgcttcttgcgtttgtcgcgctcatcgccgtagtgaacggaattctcggcggaatcggcggctggttcggtttcaaacatattacattagaatccattctcggttacgtgttttcaccgatcgcatttgtaatcggcgttccttggcatgaggcgctcggagcgggaagctatatcggacagaaacttgtgctgaatgagtttgtcgcttattcaaacttcggtccgcatattgcggacttttctaaaaaaacgtctacgattatcagctttgcgctgtgcggatttgccaacttctcttcgattgcgattatgctcggcacactgggcggtttggccccaagccgccgttcggacattgcgcgcctcggattaagagcggttattgcgggaacactcgcaaaccttctcagcgcggcgattgccggcatgtttatttagtaaacgataaaagctccctgcatatgcagggagcttttatgtatgaaaaacgggggatatttgtattgtgtccgaggggaagagcttttatactaagtaaaagaaaaaaagttggaggccgatatgaattcattccgttttaccaagatgcacggtcttggaaacagttatatatatgtaaatcaatttgaagaacagctgccggaagaacggctggctgagattgccgttaaagtgtccagcattcacacgggcatcggctctgacggaatgatcctcatctgtccgtcagaaaaagcgccggtcaaaatgcggatttttaataatgacggctcagaagggaaaaattgcggcaacggccttcgctgtgtggcaaagtatgcatacgaacataagctgacagaagaaacgtcctttttcattgagacgctttcaggccttgtgaaagcagatattacggaagaaaacgggattgtgcgtgaagtcgccgtcgatatgggcgaaccgcgcctcaccaaaaaagagctgccgatgctcggcaatgaagatgaacggacgatcgatgaaacctttgtttttggagaaacggagctttccggaacagccgtatcaatgggaaacccccatattgtttttccggttgcggatattaatcaagcgcctcttacaacgctcggtcccgtcattgaaaaagacccgagatttccggaaggcgtcaatgtcgaatttgtggaaaccgtcagcgccgatgaacttcatttccgcgtatgggaacgcggctccggcattacacaggcttgcggaacgggcgcctgtgcggcggctgttgcatccgtattgaacggtgtttccgaacgaaaccgggatatcaccgttcatttagcggggggcgatcttgtgattaattggcaggacaacgggcacgtgctgatgacgggacccgccgaaaccgtatgcagcggcgtctattatttgtaaacagctcgtttgagaaatacgctcctcaaggtttataatagatatcagcatccgtttttaaaaaaggaggtctacttatgagtgttccagtaactattactgaagcagcggctttgcatataaaagatatgatgaaagagcatgaagaagaaaacgcgtttctccgtgtgggcgtaaaaggcggcggctgcagcggcctgtcttacggaatgggatttgagcacgaaaaaggcgaaaaagacagcatgtttgaacagcacgggatcaccgttttggttgacagcgaaagccttgatattatgaccggcacgatcattgacttcaaacagtccatgatgggcggcggtttcaccattgacaacccgaatgccatcgcttcctgcggctgcggatcttctttccgcacggccaaaaacgccggtacgccggaagagtgctaagggtcagcccgccattctcaggatgaaaaaataggacgcctttcttttcgatggcgcttgcaccattgttaaaaaaggcgtttatctgtttaataaaagcaaaacccgctcaacagaagcgggttttgctttttcaaagaggttattcaattgtatgtttcatcgcattgtacatatttgccgtatgttcatcggctttatcccgtgacatgcgcagccgttccgctgaagaaccgtaaccgatttctagtttgccctctttcagtcctttaaaaatcccatcagcgaattcatccagcggttctccttgagtatgcagccctgctccgcctaaatctgtatttaccgccggaggcgcaacttcaatcacttctacagatgaatcagaaagctgatgtctcagactcattgtaaatgaatgaagcgccgctttcgttgctgaatagatcggtgcaatagcaagcggtgtaaaagccaatcccgaagagacgttaatgacagccgcatcttcttttccggcaaaaaacggagcgaacagcatagacaggtggaagggagcttcaatgttcgttgtgatttctttattaaaatagtcccaattgtccttcgcatccgctttcagcacatgaaaacgatgttgaatccccgcgttgtttactaacacattcacttccggataattttctttcacccaatcaaacagtgatacacgttcagatggaatgctcaaatcactgacataggtaataagatccgggaatgtttcctttgctttttgaagagcgtgcttacgccgtccggtcacgatgactttatttcccgcttttaaaaaccgttctgcgaaagccaatcctattccggcatttccgcctgtaatcagtattgtatttcccgtcagtttcatattaactcctcttttccgattgtttttacttcaacaaacttacgtctcttgaacagagcttttgatataagcctttgtcattgacgacatttcatccagtactgaccgcttgtgtctcctcatcatgtcaagccggagtttaataggactctctccttcaattacccaatcaatatattgcttaaagcctttgatggtcatgcgggtattttttaaacaaatcacgatatcaaggagcggcatttgatctgctgaaaataaccgccggctggcttcatcacgttcaatcagcggcagcagtccctttttttcataataacgtaacgttgattctgtcatattacactttgctgctgcttcacgaattgaacaacatgtcttcgaaagacctccaacagtattttttccttgtcactgggtgatgatacgacttaaaccatgttttaagtcaataaaaaaaatgtgatgaattcagacatatgtcacaaaaggaaatgggcagattttcaataggtttaggagtgacggccttcacaaaaatcctcaaatcaacggttcaaatcatactatttgcaaattcggaaaaaaataaagggtatatagaatcaaaaaatctggaagatgtgctcttagtcaacacgttctaaagtcatatttttcgaaaggatattgattttttgataggaataaactaaattgtaaaagtatagaatagttaatttattttgtaagaaaaggatgataatatgataggtcaattgagcaataaaaaaatatttttaagttcttttttcatcattttgatctgttcattactcttccaattcagtatttccgataaagttctgcagtcgtattattcttccgtcggagaaagtacctacgatatcggggagaaaagtgttcgtacgattgtcatgtttctgcaagggtttatgatcttcacaacttttgtggaaattctgataggcggatttctattattcgttgccgcttttattctcggtacaaaaaaaccgaaaaaaatatatttgcttctatatacactgacttctttaatctcggcatttaaaatgttgattctttcagttgttaactacttaacggctgattcctcgcttatatattctgccggcggcaccagcttgagtctgcagctgctggatccatttctgctcatatcaattgcggctctttatgctgccgcaggaaaactgaccgatctcagtaaaggcaagagaatcattttgactggatgttttgttttattaaaactctttactattttctttaattattttatggcggataaaatttagctcgggagagagtcaattaagctgaattttattataaattaaaaaaacagagtagggagatgttatgatgaacttagtaaaatctaataaaaagtctttcattttgtttggcgtggctcttgctgcagcaacattggtttatgcactattattaacgggaactgaattaaacgtggcggcggctcatgcattctcagccaatgctgaattagcttcgactctgggcatctctacagcagcagctaaaaaagcaattgatattattgatgcggcatcaacaattgcttctatcatttctctcatcggtatcgttacaggcgcaggcgcgatttcttatgcaatcgttgcaacagcaaaaacaatgattaagaaatacggcaaaaaatacgcagctgcttggtaaaatcgaccaataaataattgctctttttgtacaagctgcaaaaagagcctctctcccaaatacatatgtaaggattgaaagtatgatagtcaaacaaattgcggctcttatcaaatataataccctgtcatcgtttcgaaaaagaaaggaagattggggcattcctcaactcaacagcaaactgctgtctgccattattatttctctgttatgtttatatctcgttttcctgggatgcggtgttgtattcgggacaaaactgattcagctgcccctcagcgcatgggggcaatttgttttaatcgccgtttcacttgagcagcttttttgggctgccggcttctttaaagaacatcacaatgcctttctgctggatacgcgcaaggtcattcatcaattaaaaaaggtgcgttttttacagctgttttctgtttttgccggccaggcgatcaaaaaaaccattttcgtatggtatctttttgtttttccggtctttttgtttttatcaagcgcaggcatgaccgggtctgcggcgatcatcgtatttttcttgggcttcgtttattttcttctcaatttatttttatctatgctgttttcttatgttgtttatcttcttacaaatatatggagcaaattgttttacttgaaaatcctgaaaggcattttattcagcgtcagcctgctggttccgcttgcagtcgggtatgccgtttatcttctcgtgtttggggagtataccgcaaaggatatttcaagctttacggagtcaccggctttccggaacatcctcatgaatacgccgtatgtatggttagcattccgctcacattccgtgctcgttttcgctgcggtgtttgcggccgccgtccttttaacggcggggatgtttaaactgtggtcggccacgctgaagaaaatggaccttattccttatatgtttttgacaaacgctgattttgcgccaaagctgaaattatatagaaataacaaaatatttcatgccgtttttcaaaaggatctgctgtttttatcgagaattgacgggttttttatcaggaacttcggcagtatgctgtatttgttcatgctgtttttaggtttttgtattccgcttctatcgcatcactttatcgggtattcggcagccgccatcgtgtctgcggcggttatcattgcgaacttttcgtatcagctcgtcggagatgcgctcaaaacagtattatcagttgacggggaaataaaaaatcagcatctgtttcaccggaatatcaaacatgcgtggcagctggtgtttccgaaagtatgtatttataatctcgccgctcttatctattcgttcatcatcaccattttgattacggtgttttttccgtcttccgcggcgctgacgatttacctgtttattgtgtttttatgttcgggttttttatacagtctcgtccagatttcaagcaccgccctgtatcctaagaaaaactgggagcatctgtacgaaattggagaagcggggaaagcaaagacgtataacaacttatacagttctttcattttcattgtgtcgcttcaaatcgctgcgatcacgtcctattttatctataaaaagccggaacttgaaacgatgcttattcattctgcatcaggtatttttgtcctgttcacactattaaactatggagtcatgtttctgtttcttcgcagaatcaatatggcggaaaggtttgcgaacaatgattaaattagtgaatatacaaaaaaactatagtgaaaaacaggtattgaaagatatttcgtttgaggtgaaaaaaggctcaatctatgctttgctggggactaatggagtcgggaaaacaacgactttgaaaatcatttcgggcctgcttaaaccgacttcaggccgcgtcatgattgacggcaaggaactggattcagaagagggggggcaaatatcggctgatatcggttttgtgcccgaccatgcttttttatatgattacttaacgggagtcgaatacttgcgttttacagcggaaatgtttcaagttccgtctcagcggacaaatgattatataaagaatatgttggagacgctgaagctttctcaagacggaaatcagctgattaaaacttattcacatggaatgaaacaaaaattatcaattgcggcagcgctcattcatcagccaaagatattaattcttgacgagccgctgacgggcattgatttaatcagcggtaaaacgatacggacgttattaaaggagtacgtcaagcagggaaatacagtcctgttatcgactcacctgctggagctggcgcattcgctgtgcgatacgatcggtattatacatgaaggcgtttttgcggcggagtatcagtcatccgagcattcattagaagagattgaagaattggctgagcgtatctatacatgatgaaccgcatgttgccggcaatcagaacgtccgccattccgttaaccgcgtcagtgctgtttttttcaggcggtgtgatcgctgcgtttttttccgatcactttgtttcatcagcgtcttacaacggctcgtcaggcgcggttgaactgctgaaaaacaatgcaatcgcttgtctgtttttagccgcgggtttttttacctttgggttgacctcaatcttttatttattcaccaacgggtttattttaagcggctctattatagaaaatctgcatagcggggttcctttttatcagatttttttactgctaattcctcatggtatatttgaagttcctgcgttattattaagtggcgccattggttttaagggcgttgaattggtcatcaggctgtgtttttctaaggaaaaaaagataatggtttcaatgttcaggcatattggaatattggtgctgcttattatttgtctgctgatcgccgctgccgttattgaagcttacatcacaccaatttttaagtaaaaggggcagaaatcatatgagaagtaaattatcattaatcggtgtgccgattgttatgattatcggttatatcatttctttatcctttgagtggctgtttcctgttcttacttttggggtggcaggactatatctctttatatttgctccggtgcaaaataaattcattcgttacatctttttgtttatttttgtgattaatctgttagccagtgcggctctttatttcggtatttaataaaaaaatgacattcaatatgaatgtcatttttttttatcttcgagcggctctgctgcatgttaaaatctgtcgccgttgaaaatagagttttttacgattacatagtcgacattacggatggcttcgagtgtattgccgccggcgtaagagatggaagattgcagatcctgctccatttcaaccagcgtgtcctgcaaagaccctttatgttcgacatgcatttttttgccctcgacgtttttcttttcgcctttttgaaattcagaagcggagccgaaatattctttgtacagctttccgtcgatttcgatcgtttgtcccggtgattcttcgtggccggcgaataatgatccgatcatgaccatagacgcgccgaatcggatggatttcgcgatatcgccgtgcgtgcggatgccgccgtcagcaatgatcggtttgctcgccgcttttgcgcaccagcgaagcgcggctaattgccacccgccggttccgaagccggttttaatttttgtgatgcagactttcccggggccgattcccacttttgtcgcgtcagcgcccgcgcgttccagctcccttacggcttcaggcgtcccgacattccctgcaatgacaaagctttccgggacatgttctttaataaattcaatcatgctgatcacggcattggaatggccgtgcgcgatatcaatggtaatataatccggcaccagctcctgttctttcagctcccggatgaattcatagtcattttccttcacgccgacactgatggaagaaatcagtccgcgcgctttcatatcccggacaaaagccagacgtttttccggctcgaagcggtgcatgatataaaaatacccgttttccgcgagccaggccgcgatgttttcatctataatcgtctgcatgttggccggtacgaccggaagtttaaacgtgtgtccgcccaacgtaactgatgtatcacattcagatcggctttcaacaatgcattttgcaggaatcagctgaatatcttcgtaatcaaatacattttccatatataacacccctaaaagcgaataatatatttaaataaaattaaaatgttcgtctttttataatgtactttgttttgtcaggaatgtcaaatgatttcatgctgcctcatatgcggtcagcttgtcatccatttgcagtttggttatcatagtagtattggttgttgtaagacatttgttacgatagatagatttgcagaagaagggaggggccggtatggaacaaaaacagcccgggcacagcccgaaagcccagaaaattcaggaccggattattttaggcacgatttgggtcgtgtcggcgcttgtcattgcgctcgttgtcggaaccgtcatgaattatatttggatgtttaaataaaaaagagtctgtgccggtatgacacagactcttttttatattatttttcaaacatgcttgtagaatgcagtggctggacgcgcgctttcgggtccatgtaagccttcgcgttgttcacggctgtcggagcttcgccgaaaccgctggcgatcagcttgactttgccttcatatgtgcagatatctccggcggcaaagaagccttcaatattcgtttccatcgtgcttttgacgacgatggaatttttctcgatatcaagaccccagtttttaatcgggccgagagaagaaacaaagccgtagtttacgatcaggtcatcaatttcaatgatttctttacggtcgcctttcacttcttcgagaacgagctgttcgatccggtcttcaccgacaagttcagcgggaacaaacggtgtcagcacgttgactttagaattatgcaggttttcgacactgtgctcatgcgcgcggaatttatcacggcggtggatgatgctgacttctttggcaatcggctcaagcatgagcgcccagtcaacagcggaatcgccgccgcccagaacggcaacgcgtctgcctgcgaattgattgaggtcgtcaatgaagtagtgcaggtttttgccttcatattgttccgctgattccagctcaagctttctcggcttaaatgcgccgtttcccgcggtgataatgaccgtttttgaataatgcgtttctgaattcgtgacaagcttaaacacaccgtccgcctgtttttcaacagattcaacggcctgctctaagcagatggtctgatcgaactttgccatttgctcttttaagttgttcacaagttcctgggcgcggattttcgggaatccggctacatcataaatatatttttcagggtacagcgcgctgagctggccgccaagctgaggcaggctctcgatgattttgacgctcgcctgtctcattcccccgtaaaaagcggtaaacaggccgaccggaccgccgccgatgaccgtaatatcataaacctttgaatcctcttgcataccaaattgcctcctaattgaaaattgttattaattataacatacaatttgaaaggatgacgagtgccgaaaaccgcccggccgcttcattcttgaaaaaaattgcggccgccgctaagatggggacaaattccaatctgttttttcctgaatgttttccgattcttccggatagtatggtgatatgcagacatgtgcggttttctaaaaaattttatatttcatttcataaaatcccgccaataagctgaagctaatacaaatgttgatttgattatgcgtctaacagcaaaaaaaagaaggtggatgtgatggcattgaataaacccaaaatcgtggttttaggtgcaggttatggtggattaatgacagtaacaaggcttccgaagcatatcggggcaaatgacgccgacattactttggtcaataaacacaattatcattatgaaacgacatggatgcatgaagcgagcgcaggaacgctgcatcatgaccgctgcagatatcaaataaaagatgtaatcaatgaatcacgggtcaaatttgtgcaggataccgtaaaagcgatagatgtgcaaaataaaaaggtgacgctttcacaaggggacatcccttatgattatctcgtcatcgggcttggcgccgtccctgaaacattcgggattaaaggtttaaaagaattcgcttttccgatcgcgaatattaatacgtcgcgccagctgaaagaccatattgagctccaatttgcgacatacaatacggaggccgaaaaacgccctgaccgcttaaccatcgttgtcggcggagcgggctttacgggaattgaatttctcggtgaacttgcgaaccgcaagccggagttatgcagatattatgatatagatgaaagtctcgtccggatcgtctgtgtcgaggccgccccgacggttttgccgggatttgatccggagcttgtcgattacgccgttcaataccttgagagcaaaggcgttgaatttaaaatcggcaccgcggttcaagaatgccgcgcagacggtgtcacagtcggcaagaaagatgaagagccggaagaaatcaaatcgcagaccgttgtctgggccgcgggtgtgcgcggacatccgatcgtggaggaagcgggttttgaaaatatgcgcggccgtgtcaaagtcaaccctgatcttcgggcgccgggacatgatgacgtttttattctcggcgacagctcgctctttatcaatgaagagacggaacggccgtacccgccgactgctcagatcgcgatgcagcaaggagaaacggtcgccaaaaatctgggcggtttgataaaaggaggccagcttgaagagttcaagcctgacattaaaggaacggtcgcctccctcggtgagcataacgccgtcggagtcgtatacggcaggaagcttaaaggcacgccggcgtcctttatgaaaaaggtcattgataaccgctcgctctttatgatcggcgggctgggcctgacgctgaaaaaagggaagtttaaattcttctgaaaacccgcagccgcgggttttctcttcttttaaaaaagagcgctataaaaagcatgtaaaagaaaaaaaagaatgtttccgcttacatgagttgttatgttacatattctgacttggtgcttgacaagtaaatatgatatattatcagaaaattaagaaaaagggtgatccgcatgaaaacgacagcaaaaagcacggcggcgtgtccgttctgctcaggtaaagggtattttcaattgcttcttggcggctccgaaacatgtccctcctgccagggaagcggcaaagagagacgctgatttttccagacgttgacttttttaccgccccgaggtacactgaaagtgctgtagggggtggatgtttgtgattagtttgccggttgtcctgatctcaatcgtactattttttgtactgtttttcggcataggctttctgttgaacatgctgcttagaatgtcgtggattatggctgttgtctatccgattgtatgccttttcattatcagcaataaaaagatgatcagttacgtgcaggcgccgggggaatcctttcaaagcctgtttcagcgcatcatgtcattagcggttgcggatgtcgtgattttggcgggcggactggcgggagccatcatgtcaggcattgccataaaggcgctcagaaaaagaggatatcaaatgttttaaaccgctttcttattcaagaaagctttttttgtgtcacggcgctttttgtatagcacctcaccgagttgggaacaatgactcggaggagagtgatttcagattgacgataatcagacgcgtattcatgatcgtgctctttttgggcgcatgccatgcgacatacttttctataaccggtgttgaagcaaaggatctgacaaattggatgacggaacatcgcggcgccgttttgaaaaacatcggcactccgtttcaatccttacagaatcagccggaaaagaaggcatcaggcagggtaaagccgctggaagaagcttttgactgggaacgctatccgtcacaaaaagtgacggccaccggttataccgccggagcggaatctaccggaaaatctccgggtcatccgcagtacggaattacatattcaggtgtgaaggtcaaacgcgatttatattcaactgttgcggccgatccgtctgttttcccgatcgggacgattctgtttataccgaattacggttacggggttgtcgccgataccggctcaaaaattaaaggcagccgccttgacctctactttgacaccgtcaaggacgtctataacaattggggcaaaaaaacacttgaggtctacattattaaaaaagggaacggcacagtgaccgaggacgaacttgtaaagctgaacgaaacaaagtcgctgcaagtgttcagaaatcaatacaaaacggtaaaagaataaaaacgcttcagcatccgctgaagcgtttttacataaagaaataatctaaaatcaatgtcagcacaataccggtgacgccgccgaagaacacttcaatcggctgatggccgagcagttctttcagtttcttctgtttttctttctcttccgctttctgaaagtccttcgcttcgctgacaaaccgattaaagtcgatgaccagtttattaatgactgtcgcctgttcacccgcatgccgcctgacacctgtagcatcgaacatcgtaatgacggcgaaaatcgcggcgactgcaaacaggggcgagtccagtccctgttccaaagcgattccggttgacagcgcggtgacggcggcggaatgggagctcggcatgccgccggtgctcgtcacaagagaccagtcaagttttttggatacgataaattgaataggcacttttacaacttgggcaaaaataatggcggcaaaactcgccagtaaaggaaaattcataagtacatccatatgcgacatcctttctgtatctgctgattccgatcgtatcgaaaaactgcagaaaacgcccttagtttggtaaaataaaatcaatgaaaaatgttttttcattataccactttacataacaaatacccacataaggagtgtgtactcatgttttatgcatctgatcaactgcggcatcccgaaacactggtcatcggtctttttcaaaaaagcacgctgaacggatttacgaaggaattggatgataaattagacggtcatctgacccagctgttaaaggatggtgatgtgtccgccaaacgcaatcgtgtatcaaaagtataccctccggctgcgaccggtatgaaacgtatttattttatcggcctgggaagagaagcggattattcgtttgaagatacgaaagaatgctttgcacgagtatttcagcagattcatcaagataaaaaacaggaagtatccgtgttgctcgatacattcgtctccggggaagtgcctgccgccgatgccgctcatgcgctttcggaaagctgtctgcttgcggtttatgaggtgcaggattataaacataaatcgaatgagccggatcaggaactgaaatcagtctgcgccgtgaccgaagaagacctgagggaagtgcaggccggcctgaacgtcggcgcggcatacggccaagggacgaattcagcccgcacgcttgtgaatatgccgggtaatatgctgacggccactgatttggcgtcatatgccgctgagcttgcggcaaaatacgatttcgagtgtgaaattttagaaaaagatgaaatggaagagctcggcatgggcgggctgcttgccgttaacaaaggctcatccgaaccgccgaaaatgatcgttctgaagtatcagggcaaagatcagtgggaagacgtcatcggcctggtcggtaaaggaattacctttgatacgggcggatattcaattaagccgaaaaccggcatcgtcggcatgaaaagcgatatgggaggggccgcctcggtattgggcgcaatggaaattatcggcgaactccggcctgaacaaaacgtgctcgccgtcataccgtctacggacaacatgatttcgtccgatgctatgaagccggatgacgtcatcgtttcgctcagcggaaaaaccattgagatcctgaacaccgatgcggaagggcgtctcgtgcttgccgacggcatcacatacgccaagcagcacggagcctctgtccttgtagacgtcgcaacgttaacgggcggtgtcattgtcgccttaggtaacgaaatgacgggcgccatgaccaatcacgccgcgttttatgaacaggtggcggaatcggcgaaagaatccggcgagccgatctggcagcttccgattacagaaaaggataaaaaacgggtgagaaacagtcagatggctgatttgaacaattctccgggaagagaaggccacgcgattatggcgggggcattccttggtgaattcgcggaaaacacgccgtgggttcatctcgatattgcgggaaccgcgacggcgaataaagcgacatgcttcggccctgccggcgcaacaggcgtcatggcaaggacgttggctgttttgactgagcggtttacgcccgaaagataacagcatcccgctgccttgatgcagcgggttttttgatttccaaaatctttagttgactaaagcgcagaatgtatgttaactttaattatctactacattagcaaactaaaggatttttggagggactcatcaatgaatgctgttgttgtcgcagtattgcttatgctcgtcttaagcctgctgcgtgtcaatattattatagctttaatgatcggcgcgcttgccggcgggctgaccggcggcttaggcctcggagagacggtgaaggcttttacggacggtctcggcggaaatgccaccgtcgcggtcagctacgcgctgctcggagcatttgccgcggcgctgacgaagacggggcttcccgatgcaatggtggaagcgtctgtcaaactaatcggaaaaaaggaagattcgcggaaaaaagcactgtcaaaagtgttaatcgtactggttattttaatcatatcctgtttctcgcaaaacgtggtgcccgttcacattgcgtttattcctgtattgattccgccgcttttaaaaatatttaacgaacttgaaatagaccgcaggctgatcgcgtgtgtgatgacattcggactgactgcgccgtatatcgttctgcctgtcggattcggacagattttccaggggatgctgagagataatatggcgtcagccggtttaaaggtgccgctcagtgatattccgtatgctttaatcatcccgacggccgggatggtagtcggtttaattttatccgtcatcgtcttccggaaaccgaagaaatatgagacgaaggagattgccggactgtcgtcttctccttatacgaaaaaaagcattgccatcgccctgatctccattgccgtgtcgcttgccgttcagctctatctgtcacaagtgctcggagtggaaggtatgatcatgggcgcgcttgccggcttgtttacgctgtttatcagcggagtcatgaagcgcaatgaagcggataagctgatcacggacggcatgattctgatggcttttatcgggtttgtcatgcttgttgcggccggtttttcaaatgtattgaacaaaacgggcgatgtggcttccttggtcaaagcatcaacaggctttatcggtcacagtcaatcattaggcgcgctcctgatgctggtggtcggtttattaatcacgatgggaatcggatcatcatttgcaaccgtacccgtcattacgaccatatttgtcccgctgtgcgctcagctcggattcagcccgatggcgacgatcgccgtaatcggagcggccgccgcggtcggtgatgcgggttctcctgcaagtgacagtacgctcgggccgacgtcaggcctcagcgccgacggacagcaccaccacatttgggatacgtgcgtaccgacatttattttctataacattccgcttgtgatattcggctggattgccgcgcttgtcctgtaaaaaaaggctcccggaaaggggagcctttttgtatgctgagaacatcttacgccggatttctgctgaaccccgtcgctttatgaatagacctgtatacggcaggcgcgattgatgccaataacagtgctaaaacgatatcttttatgaaaaaccatatcatgtaaaaccaggccattccgtagctgatcggagcatgaagccataatttcagcgcaatatacgtataggtcgtgccaatgatataaatgacggcggtaccgatcaaagaggcccatgcataatgcaggcggccgggtttttttgttttttccagcagccatccggctgcaaatgccgccgggatgtaagcgagaataaacccgccgctctttccgataaacggcgcaaagcctgctgagaattgagcgaaaacaggcgcccccgcgagtccggccaatgcgtataccgtcattgcaatggctgcccgtctggcgccgagaagcatcgcggctaacagacaaaagaaaggctgcagcgataacggaattcccgcaacttgcaaaaaaggagccattgatgtaatgttggcgccgacggccatcagggcggcaaacatgccgatcagcgccatatcgcccgcgcgaaggttgcgttgtgtcatttgtttttcccccttacacttgtaccagattagcgtaatcgaagggtgattgattgtcaacaaagatttaatacaggtttactaaatggagggagccatatgtttttcgggaaaacgaaacaaacaaaacagtcggaacggattccgccaaatcaaaatgtcacaacgaagtttcccgtgcttcacgccggaaatgttccttattatgaagatatgtcaaaatggaatctgcaagtgtacgggcttgttgaccgtcctatgctgttaagctttaaagatatcaaagcctttccggaagccgaagtgaaaaatgatattcattgcgtcacgggctggtcccgtcttgataatatctggcagggaatacgcgccaaagacatcgctgagaaagcgggtgtgcacaaagaagcgggattcgtcattctgcacgctgaagagggctggacggccaacctgccgctttctgattttacgcgggaaacatccctgctggcatatgcgcataacggcgagccgttaacgccagagcacggctatccgctcagaggcgttttcccccatctttatttctggaaaagcgcaaaatggctgcgcggcattcagtttacaaaggaaaaccaccccggcttttgggagaaaaacggctaccatatgaggggagatccatggaagaatgagcgctttacatgggattaagcccctatccctatatagttcttaggtaccttattaaaataaggtgctttttttatatcaaaaatccattgactttgtttggcaaaaaacctattatttgaggtgtcttttgatattgaaaatcattatcaatgaggatagataaagtaattgccacaaaggggatgaacacataatggacggaaaacaaataaaccgggggttcgcgccggccggccgatacgcggttccgggcacagaagtaagagaaatgcgctcaaaaggaggccgtacgtatcgtatctttgtctcttttcctcaggaagaaccgcctgcctccggcttccccgtcatctacctgcttgatgcaaattccgtgttcggtacaatggccgaagctttgcgggtgcaaagccggcggcctgaaaaaacaggcgttgttccggcggtgattgtcggaatcggctacccgacagatcagccgttttccgccgaacggcacagtgattttacgatgccgctttctgaatcagaactgccggtgcatccgcgcggcgcggcatggcccgaacagggaggggcggaagcgtttctggagtttatagaagaagaagtaaagcccgcgatggagcgggattatccgatcgacagagacaggcagacgattttcggccattcgctgggcggtctttttgtgctgcaagtgcttttgacgaggccggacatgttccagacctatgttgcgggaagtccgtcaattcattggaacaagcgttttattcaggaaaacgcagaacgtttgtcagaccggctctctgcggaaaatcttcaagtcagtgtattgctggctgcgggagaaattgaaaaaacacataaaagcagaatcccgcagcacgcagaggcgctgtactctttattatccggatttgaagatgatggagtccgtgctgaatacagcgagtttgaaggagagggccatatttctgtcctgcccgttttaatcagcagagccctgcgtttctgcctgaatccgggagggccgcataccccgtattctcccacatgagaaaaaacaggcccttcgaactaaatgcggctgattctaattttctaattgactgcgtgttttgatttggatatgattgtcttgaatcataattgataatgataatcattatcaatatagaaagggaatgataatatggacgcattgggaatgaaagggaaaacggccgttgtcaccggcgccgctcaaggcatcggagaagcaacagcgcttgcccttgctgaacaaggcgtaaatgtggcagctatagatacaaatgaagacctgcttcccgggctaactgacagacttcggcaaaaaggcgtgcaggcgcaggggtttgccgcagatgtatctgacagtgcggctgtcaatgatatcatcgctgccgttgaacgtgacatggggcctattgaaatattggcgaacgttgcgggcgtgctgcggccgggtccggtgcaatcccttagtgatgaagattgggatcaaacattttctgttaatacgaccggcgtatttcatgtatcgcgggctgtaagccggtacatgattgagcgtcaaaaaggcgccatcgttacggtcggttcgaatgcagccggcgttccgcgtgcttccatggcggcttatgcggcgtcaaaagcggctgccgccatgtttacgaaatgcctcggactggagcttgcggcccatcatatccgctgcaacatcgtatctccgggttcaacggaaaccgacatgcagcgggcgctgtggcgggatgaaaacggagcacaggacgttatcagaggttcgcttgatacatataaaacgggaattccgcttcaaaagctggcaaagccttctgatattgcaaatgccgttttgtttctggcctctgaacaggcaagccatatcacgatgcatgatttatgcgtggatggcggcgctactttaggcgtttgatttaacgagaaggagggacaaacatgacaaatcaacatgtattgacggaagtgtctgcaaaagaggtgctggacgcttacaagcccggagcgttctttttagcttccccgaaaaggacgctccttgcagaaggtgtgtttgcaaaagtgccggatgcagacgcggagaatcagctggattcactgcctgaacgcgtaagacagacgcttcttgaggcaaagcaagccggcatcaaacatccgattgcggccggcgccattccttttgacggcagaaaagcttcccggctttttgtaccgaagaatgtccatacggcaggcccgctttcgtttgcggaatcttccgcagaaaagccgcaatccaatacatatgacatccgtcccgttccggagcctgagggctttatgagcggtgtggaacaaggcgtattcaacattacggacggcccgctcagcaaaatcgtgctgtcaaggacgcttcatctgaccgctgaaaaggatatcgacattcctcaggccgtcaagcatttggcgcagcacaacccgcgcggctatacattcgcttcggatgtgacgggaacgtcagaaacaagaaaaacgcttttcggcgcaagtcctgaactgctgctgtccaaaaacggaacatcgattctgtccaatccgctggcaggttccagacctcgcagcacagatcccgccgaggatcagagaagagcggaagaactgctgcaatcagcaaaagatctgcatgaacatgccgtagtcgtggccgccgtggccgccgccctaaaaccgttctgccgtgtgcttgatgtgccggaaaaaccgtcactcattaaaactgaggcgatgtggcacctgtccaccgaggtaaagggagagcttagtgatccgtcaacgacatcgcttgagctggccatcgctcttcatccgacgcccgctgtatgcggaacgccgacggatgcggcgagagaagcgattcaggatatagagccgtttgaccgcaatttctacacgggaatggcgggctggtgtgatgctgaaggtgacggagaatggattatcgcacttcgctgcgccgaagcggaaacaaggtctctccggctctttgcgggtgccgggattgtcgccggatcaaagccgcaggatgaactggacgagacatcggcgaaattccgcaccatgctccgggcgatggggctttaccaagatgagttgtaaaaaaggagggaacggatcgtgctgactggatttacgccatggccggaagaatgggctgaaaaataccgaaaagacggctgctggaagggtgagacgttcggaggaatgctgaaagagcgcgcggctttatacggaaatcaaactgccgtgacgtgtaaagatgtacattggacctacaaagaattagatgaaagggccgatcgtttagcggcggggctgcataagctcggaattcaaaaggaagaccgcgttgtcgttcagctgccgaatatcgctgagttttttgaagtgattttcgcgctgttccgactcggagcactgcccgttttcgcgctgccttctcatagaagcagtgagattacgtatttctgcgagtttgcagaggcgaaagcatacatcattcctgatacgcattcaggttttgattacagggcgcttgccagacaggtgaaagacaaacttccggatttggcgcatgtcattgtggccggcgaagctgaagagtttcaggaactgagcagcctgcatagagagcctgttcagctggaagaggtaagcccggcggaagtcgcttttttacagctttcaggaggcagtacggggctgtccaagctgattccgcgaacacacgacgattacatatacagtttgcgcctcagcgcggaaatatgcggcttggatcatcacagcgtttatttggccgctctgccgacagcgcataattatccgctcagctcgccgggtgtgctgggaactttatatgccggaggccgtgttgttctgtcaccgacgccgagtccggatgactgcttcccgttaattgaaaaagaacgtgtcacgattacagcgctcgtcccgccgcttgcgatggtgtggatggacgcatccggttcgcgaagtgatgatttatcaagccttcaagtgctgcaggtgggaggcgccaaattcagtgctgaggcggcccgccgcgtaaagagcgctttcggatgcacccttcagcaggttttcggaatggcggaaggattggtgaattatacgagactggatgatcctgaagagatcattgtcaatacgcaaggcagaccgatgtcaccttttgatgaggtaagggttttagacgatgacgggcgggatgtcgccccggagaagcgggacatttgtttacacgcggcccttacacgattcgcgggtattataaagcgcctgaacataatgaaagatcattcacagccgacggattttatcagaccggcgatatcgtcaaactgacggcggacggctatatcatcgttgaaggacgtgcgaaagatcaaatcaatcggggcggcgaaaagattgccgctgaagaggtggaaaatcaccttctggcccatcctgccgttcatgatgcggccatggtttcaatgccggatgattttctcggagagcggtcctgtgtgttcgtcattccgaaaggagaagcgccgaaaccgggagagctgaaagcgtttttacgggagcgcgggctggcggcatataaaattcccgaccgggttgaatttatcgcttctttcccgaaaaccggcgtcggcaaggtcagcaaaaaggaccttcgcgaaacgatcgcccaaaaattgaagcctgctgaaatcaaacaatcttaaaaaaggaagtgtttacattggctataccgtcaattcccgcatatgcgctgccgacagcgtcagatatgcctgaaaataaagtatcgtggacgctgaacccgaaacgcgcggtgcttctgatccatgacatgcagaattatttcgtcgatgcttttgagaaagggaaggctccgatcacggaggcggctcagaatatcaagaaaataaaagagcaatgcaaagcgctcggcattccggtggtgtacaccgcgcagccgggcagccaagacccggcggaccgcgcgctgctgacggatttttggggaccggggctgaaaagcgggccttatgaagaaaaggtcattccggagcttgccccggatgatcaggacattgtcctcacaaagtggagatacagcgcgtttaaacggacgaatctccttgacatcatgcgtgaaagcggcagagaccagctcatgattacgggaatttatgcacacatcggctgtctcgtcacagcctgtgaagcatttatggatgatatccaaagcttctttatcggagacgccgttgctgatttttcttcagaaaaacataagatggccatcgaatatgcgtctcagcgctgcgcttacacggctttgacaaacgaagtgctggagctgctgggcggcgcgccggtttctgaaggagaagggaagacttccgccgtattgacaaaagaccgggtgcgggaacaaattgcggcgattcttcaagaatcaccgtctgatattccggatcatgaagacctgctggacagaggccttgattccgtcagaatcatgagccttgtcgaacaatggcgccgtgacggagctgaagtgacgtttgttgaactggcggagaacccgacgcttgaagagtggtggagacttctttcttcccgatctcaaaaagtcttgccgaacgcagattatttataaagggagagaatagaatgcatgatacacaacagctgcctctgacaggcgcacaggccggtatctggtttgcgcagcagcttgatcctgataatgcgatttacaatacaggcgagtatgttgagataaacggcgcgatcgatgtgaacatatttaaaacagctctcgaacgtgtgctgacggaagccgtgtcattacacgcccgcttcgaagagggagcagacgggccgaagcagatcatcaatcctccatttgaagctgcgatcgatgtcatagatgtgagttcagaagctgatccgaagcaggccgcactcagactcatgcagacagatttggctgagcccgttgatatggcggccgggcctttgttccgcgacattttatttcaggcgggaccggaacgctttttctggtatcagcgcattcaccacattgcgatagacggctacggtttttcactgctggcacggcgtacggcgcaaatatacaccgcaatacgggaaggacgtccggataacgggcgctccttcggctctttggaggaactggtaaaagaagatcaagaataccgcgcgtctgatcaattcctgaaagatcgggaattttggatggagaaatttgcggatgaacctgatgtcgtcagtttggcagaaagagcgccgagaacgtcaacaagctttcggagaagcacggcttatctttctgaaacggctttgcagcatgtaaaagcaattccgaactggcatgaagccgtcacagctgcagcggcggtatatgtccaccggatgacaaacgcaggggatatcgtgctcggtttaccgatgatgggacggatcggctcgatttcactgaatattccgagtatggtcatgaatcttctgcctttacggctttctctccgcccggatatgaattttcatgaggccgtcagccaagtggcaaaagaaatccgaaacatccggcgccatcagaaataccgccatgaagacatgcgccgcgatcttaaattgctcggagaaaaccgcaggctgttcggcccgcaagtcaatgtgatgccgtttgactacgctcttgatttcgcaggagcgccaggcaccgtccataacttatcagccgggcccgttgatgatttgtcaattaacgtttacgacagagcggacggaagcggaatgcgtgtggactttgatgcgaatccggaagtgtacagcgccgaagatattgaaaaccatcaaaaacgattcctgcttctgctggaatccgctgtgaaagaccagacacaaaaaatcggcacactcaaccttctgcctgaaagtgaacgtctctgcgtactggaaagctggaatgacacgcgcaaggccgagaagcagaaaagtctgccggagctgttttacgaacaggccgtaaaaacaccggaccggccggcaatcatcaccgaaaacgaagagctcagctatgccgaattgaacaagcgcgcgaaccagcttgccggcatgctaaaggaaaaggggctcggaccggaacaatttgccgctttgctgcttccgcggtcacaggagttggccgtgagcatgctggccgttttgaaaacgggagccgcatacctgccgcttgatcctgattttccttctgagcggatcacatacatgctcaaagatgcacaccctgcatgcctgattacaacgatggaattatccggccgcatgccggaagacagtgatgcaaaaaggatcattctcgatgacccggatacggtaaaaaccgttgccgctcaaaatgctgactgttccgatcaggcggaatgttcgcctttgcaccccgcttatgtcatatatacatcgggttcaacgggcaaaccgaaaggcgtagtcgtgacattaaaaagcgtaagcaatttcctcttatccatgcgggaaatgttcccgctcggcgcacaagaccgcctgcttgccgttacgactgcggcgtttgatatttccggacttgagctcttccttccgctcatcagcggggcggggtgcgtcatcgcacgtaaagagacgattcaggaaccgcgggcgcttgcgaacatgattcactcatacggtatttcaatcatgcaggcaacgccgacattgtggcattcattagtcaccaatgaacctgattccctccgggcgctgcaggtgcttgtcggaggtgaggcgcttccgaacgcgcttatgcatgctctgcttgaatcaggctgtacggtgacgaatctgtacgggccgactgaaacaacaatctggtcggccgcacagccgcttgcaaaagaccatacaggggcgcctccgatcggaaagccgatttggaacacgcgggtatacgtgctggacgccgcattgcagccagtcccgccgggaattgcgggcgagctttatatagcgggcgaggggcttgccagaggttattataaccgtcctgatttaacagctgaaagatttattgccgatccgtacgggcccgcgggcgcgaggatgtaccggacgggagatctcgtgcgctggcgtgaggacggctcgcttgattatatcagcagagccgatcaccaaattaaaatccgcgggttccggatagaattaggagaaattgagtcagtgctgtcgaaatacccgggtatttcgcaggccgctgttattgtccgtgaagaccagccgggagataagcgcctggcggcttatgctgtcgcggatcagccccttgatatcggcggacttcgtgaatatatgggcgaaagcctgccggattatatggtgccgggcgcgtttgtacagctgaaagaattgccgctgacgccgaataagaagctcgatcgcagcgctctgcctgcacctgatttttcagctgtcctgtctgacagagggccgcggacgccgcaggaagaaatattatgcgatctgtttgccgaggttctcggtctcgcgcgggtcggaattgatgacgggttctttgaattgggcggacattcgctcttagccggacgcctgatgagccggatccgggagacgatgggcgcagagcttggcatcggacgtctgtttgataccccgaccgttgccgggctcgccgcacagcttgacaccgcaaagagtgcgcggcctaagctcaagccgtttgaccggccggagcacatcccgctgtcatttgcgcagctgcgtctttggtttctctactgtcttgaagggccgagcccgacttacaacattccggtgattgtccgcatgtcaggcaagcttgaccaatcagcgctgaaacacgccttttacgatgttgtcagccgtcatgaaagcctgcgcaccgtttttccggaaaataagggatcatctcatcagcttattttacctgctgaagaagcccgccctgtgtttacagtgacacgtgcagacaaaaacgagctccaagacatgcttgccgctgcggcaagatatcggtttgatctcgctaaagagccggccgtccgggctgagctgtttgatcttggtgacggcgaatatacgctgatggttctcctgcatcacatcgcaggcgacggctggtccttgaatccgctcatgcgtgacttatccatagcctatatcgcccggcaaacaggtgaaaaagcagaatgggcgccgctggcggttcaatatgcggattatgcgctttggcagcagcagcttttaggcagcgcgtctgattctgagagcttaattgcgcgccagctggatttctggaagaaaacgcttgaaaatgtaccggatcagctggagctgccgtctgattttccgcgtcccgctgaatcaagctacaggggcggcgtcattccggtcaacatcggccaagagcttcatgcccgtcttctctcacttgccagaaatcagcgcgtaagcctgtttatggtgcttcaatcagggctttccgcactgctgacccggctcggggcgggaaccgatattccgatcggcagtccgatagccggccgcagtgatgacgcattaggagaccttgtgggtatgttcattaatacactcgtactgagaaccgatacctctggcgatccgagcttttgtgagcttcttgaaagggtcagggaaatgaatctcgcagcatatgaacatcaggacgtgccgtttgaacgtctcgtggaagaattgaatccggttcgctcccggtcaagacatccgctgttccaagtgatgctcgcattccaaaatacgcctgaccctgtactcagtcttcctgatatggaaacaagcctgcaaatcagcagtgtcggatcgtccaaatttgatttgacattggaattggctgaacagcgccatgatgacggcacgcctgccggtattgaaggcctgctggagttcagtacggacttattcagaaaagaaacggctgaagcacttgccggacgcctgcttcttctgctcgaagatgccgtatcacatccggataaaccgatcggaagcttaaccattctttctgatgaagagcgccggaagcttttgccggttaaacgggcaaaacagcatattcagcctcggcagacactgcctgaactgtttgaaatacaggccgccgcaaaatcggatgaaacggcggcagtatttgaagagagcggactcacttatcaagagctgaataaaagagccaatcagctcgcgcacatgatgattgcccgcggcgtcggcccggagcagtttgtcgcactggcgctgccgcgttctttagatatgattgtcgggctgttagccgtcctgaagacgggggcagcgtatttgccgcttgatcctgattatcccgcggaccgcatcgcttttatgttacatgatgccaagcctgtatttatgctcaccaaccgtgaaggcgcaagtaagctctctggcgaaaacggcatgccggccttcatcctggatgatccgcagaataaggaaacacttcggcaatatgccgtcacgaaccctgagaatgccgaccggattcgtccgctgagaccgcttcacccggcctatgtcatttacacgtcgggatcaacaggtgtgccgaaaggtgtcatcattccgcacagcaatgttatccggctgtttgagtcgacgcggcattggtatcactttaattctgatgatgtatggacgatgtttcactcctacgcttttgatttctctgtctgggaaatatgggggccgctgctccacggcggacgtctcgtcgtcgtgccgcatgacatcagcagatccccggaagcgtttctgcatcttctcgtgaaagagcgagtgaccgtacttaaccaaacgccgtcagcgttttaccagctgatgcatgcggaaaaagaacacaaagagctggggcatcagctcgcactcagatatatcatcttcggcggcgaggcgcttgagctgagccggcttgaggattggtacagccgccacgcggacaatcagccggtgctcgtgaatatgtacggcattacggaaacgacggtgcacgtcagttaccttgaattagacaaaaacattgccgaactgagagcaaacagcctcatcggctgcggcattcctgatctgaacgtatatgtgcttgatgaccggctggagcctgtgcctccggggatcacgggcgaaatgtatgttgccggagggggcgtggcacgaggctacttagggcggcaaagcctgaccgccgaacgctttgtggctgatccgtacggcccgccgggaacgagaatgtaccggacgggggatttagcccgcctgcggacggacggttctcttgattatatgggcagggcggaccaccagattaaaatccgcggcttccggattgaattgggggaaatcgaagcggttctcgtcaaacatccggatgtcgaggatgccgccgcagtcgtccgtgaagaccggccgggagataaacggctggccgcctaccttgtccgatctgccggcagcaccttggacacgggggacatgcgccggtttgccgaagaaagcctgccggattacatgattccatcagcttttgtccaaatgaatgaactgccgctgacaccgaatggaaagcttgaccgaaaagcgctccctgcgcctgacttccaaacggaggtcaccggccggggaccgagaacgccgcaggaagaaatgctgtgtgagctgttcgcagaggtgcttcatctgccgcgtgtcggtattgatgacagattttttgatttaggcggccattctttgcttgcggttcatttaatgagccgtattcgggaagcgatgggagccgagctcagtatcggaacactatttgaagctcctacggtggcaagccttgctgaaagacttgagtcaggaacgggcacaagcgcgcttgatgttcttcttccgctcagaacggcaggagaagaaacaccgttgttctgtgtccatccggccggcggtctcagctggtgttatgccgggctgatgtcttctttagaagctgattatccgatatacggcttacaggcgagaggcatcggaaaaaaagaaccgcttccgcaaagcttagatgacatggcggctgattatattgaaaaaatccgcaccgtgcagccgaaagggccgtaccgtctgctcggctggtctctcggagggaatgtcattcaggccatggcgacacaattacagagccggggcgaagaggtttcgcttttggtgatgcttgacgcgtatccgaatcattttctgccgataaaaaatgcgcctgatgacgaggaagccgtcattgcgctgcttgccctgggagggtacgacccggacagcctcggggatcagccgcttgattttgacaccgcgctgaccattctccgccgtgagggaagcgcattagccagcctggacgagtcagtgatgatgaatctgaaagacacgtacgtaaattctgtcgggctgttaggaacatacaagccaaagccgttccacggagatgtgctgttcttcagatccacgattattccggagtggtttgacccgatcgagccggatacttggaaaccgtatattactgggaaaatcgagcggtatgacttagactgccgccataaagatatgtgccagccgggcccgcttgccgacatcggcgcgattctggcagagaaattaaacggacggcgtacagtccggtaaagaaaggaaagagatgatatgacaaatccatttgaacgggaagacggttcataccatgtgctcgtcaatgctgaaggccagtactcactgtggccggcctatctggatgtgccggacggctgggaaacccgcctgacgaatgaaacccgccccgtttgtctcgaatatattgaaacaaactggcgtgatatgaggccggaaagcctgaagcggaccgaagctgctaaaatgtaataagaaaagcctgccgttatttcggcaggctttttatgcggacatcagccgttaagctgtgtatgatcacaaaatgtataagggtggccttcttcatccgtgcaccatgactgagacagaaaagccaaaaagaccgcggcccactggtctgcaaactggattaaaataccgccgtcgtgccacgttccgttatccttcttccagcgtgtatcaattgggtttccctgattcatatgaatattatgcatgccgtttgtcggcttgaacccgaaaatcttatcagcgcccggctccggcccgaatttagagccgtaaatatagacggtggctttttctgatttggctttttgcatgtacgtctcaataaagtcatttaagtcattatccggaccggtgacttcatgcggaaggggcaccatgttccggggatcaaacaatccgccgcggacataatccagcgccagctcacgtctggtttcatcaattggggtatatccgtacggaatgttcggcagcagggtgatcgcgcttgcgtcaaaatgatcgcgtgccgcatacagcacctctgattcttttgaacttgacatgacattgatcgcacagcgatagcgcgtatcaggctcgcctagcacctcgacttgaaaatgcggagaatcatcatctgtttcccttttcatatctaacacagtgccttttaatacaccatagtgctgaacagccatatgaatcctcctttttcttccgggatatgaattgatattcgagacagggggccgtttttccttttgtgagaaagaaaaaaggacagcccgctgatcaggctgtcctcttcatctctattaagcttttgcagccgaaccttgcattgctttttcagcaggcacgtagtcatagcctaagtctttggctaccgcttcatacgtgacatgtccgttagccgtatttaagcccgctttaagcgcagggctgtctgcaatggcttgtgccgcgcctttattggcgatttgaagcgcgtaaggaacggttacattcgttaatgcgagcgtagacgtacgcggtacggcgcccggcatattggcgacagcgtagtgaacgacgccgtgtttttcgtaagtcggattatcgtgggttgtaatatgatcaacggtttccacaatgccgccctgatcgatggcaacatcaacaatgacggaacccggtttcatttgtttaaccatttcttccgtaacgagagtcggcgctttggctcccgggatgagcacggcgcagatcagaagatccgcttccgcgacggaatctgcaatatttacagggtttgacatcaatgttttaatctgatgcccgaaaatatcatcaagctgacgcaggcggtctgcgttcaaatcgatcattgtcacatcggcaccgagtccgacagccattttcgcggcatttgttccgacgccgccccctccgatgatcgtgacttttccgcgggatacacccggtacgccggctaataaaattccttttccgccctttggtttttcaagaaactgtgccccgatctgcgcggccattctgccggccacttcggacatcggcgtaagcagcggaagggaacgtccgtccgttaccgtttcgtacgcgatagctgtcacacctttttctgtaagcgctttagctaattccggctctgcggctaaatgaaggtaagtgaacaagaccagaccttgacggaaatacgcatactcttcagccagcggttcttttaccttcatgaccatttccgcatcccatacttgctttctgtcctccagaatttccgcccctgctgatacataatcttcatttgtaaagccgcttccgagtcccgctccggattccacaagaacccgatggccgtttccgataagctgtgaaacgcctccaggtgttaatgccactcgattttcattgtttttgatttcttttggaaccccgataatcatgtctgtttcccccaatgtttgtgtgatgcttcaagtgtagcgcgatttttgcgaaaattctttgtttgaaacagaaaataaaaaaacacggatttgtgaaatttcacgaacccatgctgcgaagtttgatatccaggtaaatcgtaaacttctcattcacattttttaagtcgatttctgcgatctggctgattcttttcagcctgtaattcaatgtattgacatggatgttaagcgctttagcggcggtgttgacattgctgtcggcatcaataaaatgttcgagcgtttttaccatatcggcttggtgctccctgtcatactgctcaagctttgacagggaatagttcatatagccgctgtgcttgcgtttttcatccaacacatcaaggtactgataaatgccgagttcagaaaagctgaaaaggtgtttggtttctctcacaaaccgctctttcgcttttaatacggaaagcgcttcctgataggatcggtaaacgtaagaaatcgattcgtaaataccgccgatcgcaatcgacgcatcctcaattttatatcgttccttcaactgtttttgaatatgaagagcgaagtgctttaaatctttaaaaggctgatcggttttcggcgcggctaataagattaattcatttgaatcaacagtcgccagcatgacatgaatctgctgtgtcgtttcctgcaaatattgcagctgctgttccgtcttttcagtcagctcatcatgtaaacggatgatcatgacgctgaacacggacggcagcgccattccgagcttatgaaacccttcggccatctcggcttcctgataaatatggccggtcagcattttccaaaaaaactcctggccccgctcttcgattttcgttttgcggatctgcaggtgcaaaagcttgttccgcaccgctttggctgccagctgaagtgtcttcagatcttcgtcattgagcttttttttgatctcaagcgcccaaataaatccgagaacctgactgtttttccagatggaaatcgccacgcggttgcttaggcccacctcgtcaatttctttcactttgatcggctggtccgtttttaaaagggccggaatggttccgtctttccacagtttgttgatgactttttccggcaccctccgcccgataatcgtcgacgtccgggcaggatctgtacaatcgctgtgcgtgctgtatgcaagcagtttatgattaacgtcttctattgtaatggggcattgaagaacttcactgatatggtcggcaacatcttcaagcctgtcgaaactgtacttaaatggatcttttggattggtcatctgtatccctactttttcatagcttcatatcttgatcttaccatcttgcttttcagactgaaaggcatctttgcagggaaatagactaggacaataagatcattcagtgaaaacgaaaataataagaaaatcatactattttatttacaaaatgtgtaattatgacgaaaaatccaatatatcataagactcattttgtaaaattaaaacagatttgtttgactgtgccgattggttgtttttataataatgacgttcaaaaaataagtgaattagcccatatttaggctgatgacacaggagggtataaggaatatgtctggattaattcgtgtcacacccgaagagctaagagcgatggctaagcaatatggcgttgaaagtcaggaagtcatgaatcaggttgaccgcctgaaccgcatgatttctgatttgaaaggcatgtgggaaggtgcttcaagtgaagcattcgcggatcaatatgagcagctgaaaccttcatttattaaaatgtctgaattgcttcaagatgtgaatcatcagctcgatcaaacggcaaatacgcttgagtctaccgaccaagatatcgctaaccaaattcgcggataataagatgaatgaagaaacggagcgcctgattcaatcaagaagacggcgctctttctatgtaagggtgatatgaatatgtatatcgatattacaatagatttaacacattataacggcagcgtcttcgatctcagattgtcagattaccattctgtgaaaaaagtcattgatattgcccggcaggctcagcatgtatccgttccgccgcgtgaaggctattggatcagagtggtcaataaagaaacggttttttccggagaacaaaagctatctgactgcggcattacgaacggagaccgccttgaaattttatgaaaggacatggtggaatgacaggtcataacagatcttatttagaaacagaattagacgccgtccgggaagaaaccgaatcaggcttcacgttcaccttccagcgggaaaaaatcaagcttcttgacgggctggaagcgaatgtgattaaagatgccgatcctttttttcaaaaagaggtctcagtttcagaagacgaagtaaccatcacaatcaaacctccttcttcttatcaggctttccgctatataaaaggaaaagataaaaaaagcaggtggcaatttgcctaccgtctcgtccaagccgtgaaacagcataagctgaaacgtctcaatctgattgccgcccctgaaaatatcgtgtttgataaagcgctgacgccttactttcttcattacggcgtaaaggagagccttccgccttatgaggaagatagagaaagggtgttaaaagagctcaaagcctgtgcggcgcttgcagctgacggggcgtacaccttcgatgaatatttgaagtacaaggagacgcttcatttctctcctgaggtgaaaagcgtgttagaggcggagacgattgaagaactggaagaagccattcaaaccgcaatcgattccctcgaagaaagggacaagacatacataaaactgccgaaaaagaaatggaaaatccaaagatacgccggtctggcgcttgccgtcctccttgtgccggcacttctttactccttatacgttctgtttttcgtccagccgaagcaagaggcaattacggaaagcaaccgctattttttaaatcagcagtacagcaaagtcattgacacactcgctaaatacgatgcggaaagcctcccggaatctgtgcagtacgagcttgcttcctcttatgtggcagttgaaaatctgagggaagaacagcggaaaaacatcgggaatctggtcacgctgcaatcagacccgaagcacttcctttattggattgatatcggcagaggggaaaatgaagaagccatcaaaatcggccgcaatcttgagtacaacccgtacatctggctcggacttacaaaatataaacagcaattattagcggatgacagtatgaaagacgacgaaaagcagaaagaactggacgccgtggaaagcgagcttgcgaaggcgaaaaaagaggcggaggaacagcataaagaagcggaggaaaacagtgacaccgccgaagcttccgccggacaagatgaaagcaaacaagacaaagcgaaagataacaaagagaacgacaagaaagatgagaaaaaagatgaaaaaaaataacagcacacatcaaatggccgcatgtaacgatcaggctgtcgtcaggaggttcgccatatgagtctgttatgggtcttttaccgagagcacgtacaaaaggttcagctgtctgaactcccgccctctcagccgattacgatcggtccggatatgaaagatacaatcacggtcggcacacttccgttacggcaaaacgccgcaaccctttatcggaaagaaacagatcgttatgatgttttcctgggaaataactgtgccggcgaattgacaataggaaatgaaatgccctgccggattgaagaagagacgatgcggcttctgctcacccctgaccaggaagaatcctccgtgtactttatcggcgggaaggatgagatcgttttctcatcagaaacagaggaagcggatatatacaaagagccgtcctccgctcaaacaggggctttttatctgcgtaagtcgggaggatgctggtctgtcgtccctgatggtcaggaagtttatgtgaacggaaagcttgcagaagctcccgaaaggctccggacgggagatgagctgctgtggaattttctgcgtgtgaggctgacggaggacgaccttttagaaatcgttcatcacgaaaagcttcaagccggtttaaccaaaacggtaaaaccaagcaccgaaatgaaaaagaaatacccgcaatatcgaagaacgccgcgcatggtctacgatcttcccgaagaccgcgtttcattcagctttccctcgcaggaaagcgaacagaataaccgggggctgtggctcgtcattctgcctcctgtggtcatgctgattgtaatgggggttgtcgctattatacagccgaggggcatattcatccttgtctctttggcgatgtttatgatgactctcattacgtccaccgtgcagtatttccgtgaaaaaaccagcggaaaaaacgggaggaaaaacgggagcgtgtgtacaagcagtatttagaaagcaaacggaaagagcttcagacgctgtcggaaaaacagctgcacgtgctgacgcatcattttcccccgtttgaaaaaatgaaatatttaacttctgaaatcagcggccgcatttgggagaaatcgctggaaagcagggattttctgatgcttcggctcggaacgggcacggtcccgtcaagctacgagatttcaatgagcggcggagacctggcgaaccgtgatgtggatgacttgatggagcagtcgcagcacatgcagcgtgtgtataaagacatccgccatgcgcccgtgaccgttgatttacaagaagggccgatggggcttgtcgggaaacctcagatcgtcaaaaatgaaattcaccagctgatcggccagctcgcgttcttcaacagctaccatgacctgcgatttgtctttatctttcatgaggacgaatataaggaatgggaatggatgaagtggctgccgcaatttcagctgcctcatatgtatgcgaaaggatttatttacaatgaacagacccgcgatcaattgttatcgtccatttacgagctgctgcgggagcgggatttggaagaggataaagaaaaaaagatctttcagccgcattttgtctttgtcatcacaaatcagcagctgatcgcagagcacgtcattttagaatacatcgaaggccggcatgagcatctcggcatctcggccatcattgccgcggaaacaaaggaaagcctggcagaaaacattcacaccctcgtccgctacattaatgaagatgagggagacattctcattcaacagaaaaaagcggtgcagatcccgtttaagctggacaggcatgaacggacaaacaacgagcggttttcccggacgcttcggacattgcaccatcaggtcggaatgacgaattccattcctgaaacggtctcatttctcgagctgtttcatgcgaaggaagtaaaagaaatcggcatcaggcagaagtgggagacaagtgagtctgcaaaatcgctggctgttccgatcggctataaaggaaaagacgacatcgtctatttaaacctgcatgaaaaagcgcacgggccgcacggattgctggcgggaacgaccggctccgggaaaagtgaatttctgcaaacatatatcctgtcattggccgttcactttcacccgcatgaagcggcgtttttgctgattgactataagggcggaggaatggcgcagccgttccgcaaaatgccgcaccttctcgggaccatcacgaatattgaaggaagcagaaacttcagtatcagggcgcttgcatccattaagagcgagctgaaaaaacggcagcggctgtttgatcaatatcgcgtcaatcacatcaatgactatacaaaactgtataaacagggagaaacggatattccgatgccgcacctgtttttgatttcagatgaattcgccgagctgaaaagcgaagagcctgactttatcagggagcttgtcagcgcggcccgcatcggacggagccttggtgtgcatttaattctcgccacgcaaaagccgggcggcatcattgacgaccaaatatggagcaactcacgctttaaggtcgcgctgaaagtgcaggatgcaagtgacagtaaagaaatcctgaaaaacagtgatgcggcgaatattacggtcaccggacgcggctacttgcaagtcggaaataacgaagtgtatgagcagtttcagtctgcctggagcggcgccccttacatggaagatgtatacggcaccgaggatgacattgccatcgttaccgataccggcttaattccgctgtctgaggtggatgcggatgatgcggcgaaaaaagacgccccggcagaaatagaagccgtagtcgaagaaatcgagcggattcaaaatgaaatgggcattgaaaagctgccgagcccgtggcttccgccgcttgccgaacgtatcccgcgcacgctttaccccgcgcaggaaaaagaccgcttcttcatcgcctgcgttgatgagcctgatcagcaaagacaggcgcctctcgcttacacaatgatggatgacggcaacatcggcattttcggctcatccggctacggcaagtcagtggctgccatcaccttcctgatgaatttcgcggaaggatacacgccggaagagcttcatatgtacatctttgacttcggaaacggcacgcttctgccattggcaaagcttccgcacaccgcagactatttcttaatggatcaaatgagaaagatcgaaaaattcatgatccgcatcaaggaagaaatcgagcggcggaaacggctgttcagggaaaaagaagtcagccatatcaaaatgtacaattcgctcagtgaagaagagctgccgtttatatttatcacaattgacaatttcgacatcgtcaaagacgaaatgcatgaattagaaacggaatttatccagatttcacgcgacgggcaaagcttaggcatttacttcctgctgaccgcaacgagggtaaacgccgtccgccagtcgctgttaaacaacataaaaacgaaagtcgtccattatttaatggatcagtcagaaggatactccatttacgggcgtccgccgttcagtctcgaaccgatcccgggccgcgtcatgatccaaaaagaagaactgtatttcgcgcaaatgtttcttccggctgaagcggaaaatgacctcgagatgttccaggcgctgaaagctgatgtcaaagctttagctgagcgccacgccggaacagccggaccagacccgattccgatgcttccggatatgctgacggccggcgaattttcactccgtctcggcccggaacaagacccgttccgcattcctgtcgggcttcatgaggaaaaggtcagccctgtgtactttgatctgggtaaaaataagcattgtcttattttgggccagacacagcgtggaaaaacaaatatcctgaaagtgatgctgaatcacctgctgcgtgaaggtgcggaacgggtcgggctgtttgactcgattgaccgcggactgtcgcagtatgcgcaggaaacaaaggtcagctatctggacacaaaagaagacgtccggcagtggatcgaaacggcagaagccattttcacggagcgcgaagctcagtatacgcaggccgtcaaaaatggcgatgtgcacaaactcagtttctctccggtcgtgttaatggccgacggcattacaagattccagcagacgatcgacaccgccttacaggacaagctggcgatgtttatgaaatcttacgcgcatgtgggcttcagttttatcccggcgggcaatcacagcgaattctcaaaaggctatgattccttaacgacggaaatgaaacagatccgccacgcgatgctgcttgtgaaaaaatccgaacaaaatgtcattccgctgccttaccaaaggcaggaaccggacattcagccgggcttcggctatttggttgaaaacgggaaggagcaaaaaatccaaatacctttatgttcagcggaaagggaggccgtcagatgaccgaacaacgaaaaagcctgatcaaattaatagccgcggtcgtcatcattctgctgctgccggtgctgtttttccggtttatcggcgatgacccgggaaaacaaaaaatcaacgccacccgccaaatcgcagtcgtgaatgaagatatgggcttacaaacagatgaaaatgaggaagaggaatccgtccatttcggcaaagaagtagcggccgctctcggcggccgtccggattattcatggacggttgtcaacaggagcgcggcagaaaacggtctggcggctaagaaatatgacgccgtcgtttacattccatccgatttttcaaaagacatcttaagctatgacaaggagcgtccgcaaaaagccacgctgacattcaatattcaaagcaacctgaacgccgtcaacaaagaaaaagtgcagcgtgagcttgaagacgcccaaaaatcaatgaataaaaaaatgtcggcattatattggaatttcgtctcacaaaaagtgaacaatgtccgaggcgattttgacaagatcgtcaataaagaatcagagtttcaaaatgtcatgtacaacttttacaagccgagctccaatgacttggcaggtgaaatcaaacggcaaaaagacctgattgacgaactgaaaaaatcaatgaatgaagcgcagggcgcggcaaaagaaaaactgacttcggcagatgaagccaaaaccacgctcaaagactttgccgacacggtcgagcgctacaaacaatatcaagaaaatcagaaaaaactgctgatggccgcgcaggaacaaaatcaaaagcaaatcacaaccggactgaacgccattaaagcacagcaggccgccaaccagttcagcacgatgatgagcgggctctcttcaggcataaaccgggcgcagacacagcttgaccagacgggatcggctctttttgccgcccaacaggtgagagaagcgcaggttcctgatcaggaacgcgggatggcgaatattcaatccaatttactggacaattatttgactcaatataaagcgcaagcaagatttgaaacattgaacagcattcaaacccttatgaaaagggatcggccggcattaaccgttccggaaaaggacccgggtgatgacggctcggatgaaccgaaagaagaagaaaaaccggaagaagaaaaacccggcgatctgaaaattgaccttgacgatcagcgtgacgaattaaaacgcatctccgctgaaatcaatcacatttctgacggattaaaagaaccggaaaaagaaaaaccggaaccggaagaaccgggccaaggcgatgacggtgaaaactccggcgataccgatccgaataacggaacggctcccggagaagacggaaaaacggaagacggcacaaaagaagagcagcctgcctccgataacacaggcgatcaggagccaaaaaccgtccagacctcgacagccgctgaaaacgtcactccgcctgctgatgagccggcggacgatccaaacgattctgaaagggacggcggcacggacatatctgaggcaaaagaaaggctgaaccaagccgcagaacgcattcagcaaattgaaaaagagctggaagagaaacagcagactcataataaagaactgaaaaaacgtctcgatgctcttgatgaagaaatccaaggccttaaaaatcagattgccaaagttgaaaaacgggcagataaattaaaggaaaatttggaagaattggaagaaacgagaaaacaagacttcgataccgtttacagaatgattgtaagaacagaacagaacattctgaactacccgtcattggatagcggccgcaaatctgctcttgaacagatgtttgccgctgacatcaatacaaaaaagatatccgatttaatgagttactataatgatttatccctgtatgaggcgacactctatcactctcttgacgcgggctcgctgcctgatgtgaaaaaccgggtgctgaaagcccagcaaggtgaagtccaaaccgttcttgccatcaaaccggaagaaacggcaagctgggaaaatctgaaaaacaacaaaatgcagactgatgaagacatcagcaatttcattaaaggcatgaccgaattctcggataactacagctcgtatatcagagatgagcaagccggggtgctcgatgagcttgccagcatttcagacagcgcggcgaaagcatccgatcagctggctgaaggcgctgtgcaggaagcggccgcgttcagcggagacggattaaccggaacgatggcgctcggcgctcaggataccgtcggccgtgaagtcctgcaaatgtctgacacgatgggccatctgtcagaacgccagtccggcatcatcagctataccgacaatatgcagcaaagcgtaaatgacgtccagcaaaaagcggacaccctgaacagcaactggggcaaaaacgtcgattccacgaaattgatcagaaatgacgtgtacggcattttagggaacgcgctcgttgacggacaggaaaacggatatgtttatgattatctcgccaatccgcttaaaatcagcggagaggtgccggaagaccgggttcagaatgttccgccggtcgtcattttggtgatcgtcctgatcagcagtcttctgatcggctatttcagctcgtattatcagcaggcgccgcttcttgtcaaaggcgcgctctttgggattttaaacattatggtcggattgatgatcagtctgttcggtctgaatatctattcgcttccggatgatcagacgattaaatggtcagtctttacgattctcctgcttgcggcgagttcagcttttatccgggcagcctttgtcttcagctcaattaccggatggatcgcatcatcagcgctcattctcttttatgtggcgcctttgatcgacctgattatgccgaacttcacctttgacagtccggtttcgaaagtctatatcgatattcaatacggaacgggccatctgtttgcgttgggggtaacggttcttgcgatcattacgctgattgcggcggcgcttccgctcgtcattcggctgtttgcggaaaaaacggaggaaagtgatcagtcttatgaggcgtaacacgttcatggaaaaaggattgctgctgtttgctctctcctttttccttttccttccccaagccgcagccgcgaatgaggaaaatactgatgtcaagccgaatgaatatgaaaagaaagacattgaaattcgtacggactacctgcacgacgatgcctactccgaggaaaaaacggcgcttccgaaagaacagaaggatatcacgtttgatcagccggccgaaaacccggatgacaaactgatatcaaatttgtttacatcgtcagacacggagccgaatacgatcaaagcgcaatcgaaacaactgggtatcacatttgccgagccggcggtgcggcatacctcggcagatatggaaacggaagagaaaaagacttcttatctgcttcccgctatttatgccgtcttgatcctcctcgggattgcggcaatgatctatctgatcccgaaagtcacggcgcaggaaaaggcaaagcggtaaaacggatcgcttgtgtttgcgggaagacagcccgtaaaataagaaaaaaaggaggagtttcatgcagttttttcttataacaggcgcgtcaaaaggcttgggccgggcgcttacggaacaggcgcttcaagaaggagccgaagtcgccgcgctttcaagaacgataagcggggaaaagcgcgaggggctgacagaatacagtgttgatttaaccgatctcgcagataccgggcggcagatgaaggcgattcttgatcaagcagaggagaaggggtactccgccgtcacactgatcaacaatgccggaatggtggaaccgatcaagcgggcgaaagaggcttccgccgaagaattgaaccgccattacacccttaacctgacggcgcccgttttgctcagccaaatgttcacaaagcgcttcgaagcgttcagcggcagcaaaacaattgtcaacatcacatcgggcgcggcgaaaaatccttataaaggctggagcgcgtattgcagctcaaaagcggggcttgatatgtttacgagaacattcgggtttgaacaggaagatgaagagctgccggtccgcatgatatcattctcgccgggagtgatggatacagacatgcagtcggtcatccgttcttcgtcaaaagaagatttccatgacatcgaacggttccgcaatctgaaagaaacgaaaaacctcagaagtcctgaatacatcgccggcgtcattcactcactgatcgcgggcgagccggaaaacggacggatatacgatatcaaagaatttttgtagagcagctttcacgctgctctttttttgtttgtacaatcacttaggggtccggcggcatatgatgaatgaaacaacatataaggggtataagaaatgtatcagatgaattgagtttcttctcgatttatgttaggattctaaaaatatatgaaggaggggtttccatgagaaatgtaacgttaatggatgtcttcacccatccaatcgcacaaaagtatttacagcgttccggtgtcgcccatgcgatcgcctgcgcgtttcatgcataccgtcttgccgtaaaagcaggtgtcagcccggatctggcggcgaaagcggcattactgcatgacgtcggccattatgaatggtacacagacggcaaatgggattatgaaaagtacagaagaaatgatatccatgccattaaaggcgcggaacgggcgcataagctgctcatccggctcggtgaagaaccgaaagcggcgaaggacattgcgctggcgattctgcttcacaccgattcctatctgcctgaaggcgaactggacaagaatacgctccagcaaatcgtgaaacaagcggatgaactcgatgaagaacccggcggacatcaccattaccgccaaatggatcacacggccgcgctcaaacaaatccaaaagcttgatcagttaattgaccgagcccaatatcccataagaagctcagtctaggccactcatgcggccttttccgcttacataactccgcatgctcactaacaccttttccgctccgatagacgtactgtgtcaaagcctttgtccgctgcatatgctgaaggaaaacatagtaaaggggatcagcgaaaatggcccatcaaggaagcccgcaaatcgtctcgttagtggatccttacgtttatcagaccatccataagcttatcggctcaaggtttatcattcaaaccgtcagacgcattgtcagaggacggctgattgatgccactccggatcacatcgccattgaagagacgcatgaccgtgtattttatatcagaaaccgccatgtggtttccgtcatgcctgattataccgaacgcgtgtaacagcccgaaaaggcgcaaaccggaggcggcactatagaaccccggtgcgtcttcttttttgagatacatagatgcacggcggctttttttggtacaatcacagtacaagttcacacgacaataggaggaaaccgcttgttgaaatcaaaggtccatttttggacgctgcaaattttgctcgttttgctcattatttacgtatcaacgaaagtctcgtttatatttcagccgtttttcggttttatcaccactctgttttttccgattttgatctcgggcattttgtttttcatttttaatccgatcgtgcgcctgcttgagaaaaaaatcccccggacattggcgatcctgctcatttatctcgttttcatcggtctgattgcctttatgttcactgccatcgggccgattgtggcttcccaggtcacggggctgattaacaatttccctgattacattcatcagattcaagtcttgacggcgcaattatcccattccaaatggtttacgtggatgatgacgcaggattatgtgtcgatagaaaaaatccagcagtctctgacgggatttttacaaagccttccgcaaaatattacggcaagcctgtcggccgtgttcggcgtcgttacgaatatcacgcttgtcgtgatcaccgttccgttcattttgttttatatgctgaaggacggccggcggtttccgctcttggcggtcaaaattctgccttcttcctaccgggcggaaggtcggaaaatatttaacgacttatatgtcacattggccgcctatttccaaggccagctgctgatttgtctctttgtcggaacggcatgttttatcggatattggatcatcggcctgccgtatgcgttaattctcgggatggtgatcgccgtcaccaatatcattccgtacctggggccgtttctcggggcggcgcccgcggtgattattgcgtttatggattcgccggctaaggcgctgtttgccgttattgttgtcgttgtcgtccagcagcttgacgggaacctgctttctccgcttgtgattggaaaacggctgaatacccacccgctcaccattattcttctgcttatcggagcgggcagtttcggcggcattctcgcaatgatcctggccgtgccggtttacgcggttttaaaagctttcgtcttaaatatcgtccggcttatcaaacttcgtcagcggtcaaagctcgaagacagccgcaagccgaaataaaaacgggcacaactcccggtgcagcgcataaaatgctgtaaagaaaagcggaggtgtgggtatgcctgcaattgtgggaccgatttatattatgagtttagccggagacgctgcagcgagcttcggtgacgtgtttgccatttctcccaaagccgttgaccactcaggcgcgggggcaggggcgtttcattccggagattttgtcaaaattactaataaattcagcaaaacgcgctttgaagacattgatgtgtttgacgaacctgattggtttaacgcgtgacagcctccttttaggaggctgtcgcttttttgtagtataatagaatcagtctttataaaaggggaatgttttatgaaaatcagaaaagcgaatattaccgtgcagtccggaatgatcggtgatgtatatctgcatgaaaataaaaaagaacagcatacccttgtagccgttccggaacttgagtggagcacgatcatttcctatgaggaagagaaaaaggcgctggcgcagcggcttttacaatcattcagcaagctgattgaagaagaacccgccggagagctcgccggcaagatctcccattgggtggctgaaatgtaacgaaaacggtttaccgcgtcccgtccggggcgataattgtaaaacaagctgggagggacaggccgatgagcgacaaaacggttgacctttatttacagcaggggatgtacggccctttgcagacgaaaccggatgaacgccatttatttttaggctcgctgcgtgaaagagtcatcattgccctgacgaagggacaggtgctgcaaaagcagccgtatgaagaagtgaaacaggcgctgaaaagccgaaaagacgcggtgctctatataaacggaaggctcccgtatcatgcttattcaccatatatgaagcttgccgcacttgccggtgtccgaagctccgtcatctcggaccttcaattcgaaacgccgctcggcctggtttttgccgccgattatgccgtgaaccttgacggcatttacgtgcaggatgacatttttcagcgctcactcctgaaatcttaaaagggcaaaacactgtttgtcattttacaatgccaattcacttacaagtggagataggatataatggttttcatatgaatggcggggaggccggctatgaaaaaagcatttatatgcattgattatacgaatgattttgcagctgagaacggggcattaacctgcggagaacccgcgagacagattgaagatacgattgtcagtttgacgcaagcatttatagaaaacggtgattacgttgtctttgcggtagattcgcatgatgcagacgatgactttcatcccgagacacgcctgtttcctccgcataatatcaacggcacggagggcaaagagctgtacggaaggctatcgcctctttatgagaaacataaacacgcaaaaaacgtaaattatatggaaaaaacgagatattctgcttttgcgggaacggatttagagctgaaactgcgggaacggcagatcactgagctgcatcttgcgggcctgtgcaccgacatctgcgttcttcacacggcggttgacgcctacaacaagggctttcagatcgtcattcatcaaaacgctgtggccagctttaatccggaagggcatgaatgggccctgtcccattttaagaacagcatcggagcgcaagtggcagagtaaggaaggggaaaacaattttggtggagcatggttttaaagacgacagtttgtctttacatacagacctttatcaaattaatatggccgaaacgtactggagagacggcattcatgagaaaaaagcgatttttgagctttttttcagaaagcttccctttgaaaacggctatgcggtatttgcgggcttagaaaaagcaatcgaatacttggagaacttcaaatttaccgacagcgatctgaattatttaaaaacggaattgcactatgctgatgatttcattgattatttacgggatctttcttttaccggatctctttacagcatgaaagaaggcgagctcgtttttaacaatgaaccgattatgcgggtcgaagcacccctgattgaagcgcagctgattgagacggctctgcttaacattgtgaattaccaaacattaatcgccacgaaagcggcccgcattaaaggcgttgtcggtgatgaagacgccctcgaattcggaacgcggcgcgcccatgaaatggatgcggccatgtggggagcgagagcggctttgatcggcggcttcagcgcgacgagtaatgtaagagccggaaagcgttttaatataccggtatccggcacgcacgctcatgcgctcgtacaagcgtaccgcgatgaatatacggcatttaagaaatatgcggagacccacaaagactgcgtatttctcgtagatacgtacgatacgatccgttcaggcatgccgaatgcgattaaagtcgcaaaggaattcggcgaccggatcaacttcatcggcatccgcctggacagcggggacttggcgtacctgtcaaaaaaagcgcgtgaaatgcttgatgaagcgggtttcacagacgcaaaggtcattgcttcaagcgatcttgatgagcacacgatattaaacctgaaatcccaaggagcgaaaatcgatacgtggggcatcggcacgaagctgattaccgcatacgatcagccggctctcggcgcggtttataagcttgtcgccattgaagaggacggcaaactgaccgacaccattaaaatttcgtcaaaccctgaaaaagtgacaacgccgggaagaaagagagtataccggattatcaacaagctgaatcaccactcggaaggtgattatatcgcgctttatgacgagcgggtaaatgatcagaaacgcttaaaaatgttccatcccgtccacacgttcgtcagcaaattcgtcactgacttctatgcgaaagacttgcatgagccgatctttgaaaacggcgttttatgctatgataatcccgaaattaccgacatccagcaatacgtgcaggataacctcaaacttctgtgggaggaatacaaacggatcagcaagccggaagaatatccggtcgatttaagcgaagactgctggagcaacaagatgcagcggattcatgaaatcaaaagcaagctgaaacgggaacttgaatagaaaacaaagcggcctttcctatctctggaaaggcttttttgttgtgataatatttttcacatttagacaaatttcgtcaagttatttgatatacttatgttcgaaggccgcatctaagggggtaaatgaatgaaggtgtttgttgcgagacagcctatcttcaacagaaacgaacaggttgttgcttatgaacttctttaccgggagagcgaagagaaccgttattcggccgcggatggagataaagctacgacggatctcattattaacagctttatcaacatcggaatcgaaaagctgactgaggggaaacgctgctttgtgaattttacagaaagcctgatgttttcagatctccctacctcctttgatcctgaccagcttattatcgaaattcttgaggacataccgatcactccggcgctcatctcaagatgcagacagctgaagaaattaggatatacattagcacttgatgatttttacgccatcaatccggaaaatgaagagttagtggaacagctgatgaaatatattgatattttaaaaatcgactttttgcaatcctcgcgtctggagcgcaaaaaaatcattcagacgtacagctgtaaaagtctgatttatttagcggagaaagtggagacgagaaaagattataaacaggcggccatagacggctttcacctgtttcaaggatattttttcagtgaaccgcgtgtcatcagcggaaatgatctgacgtttcattttcattcttactaccagcttttaagcgaattaaacaatgaccagcctaatatacagcgcgtgacggaatacatagagcgtgacgtcagcttatcgtatcagattctgcgttttttaaacggatcgcaaacaagactgaaaaaaaagatagacagcatccagcaggccatcatgatgctcgggctgaatgagattaagcgcttgatttacattctttcattcagagatttaacggcgaaaagccactcaagccaaaaagaaatcattaagatttccttaatcagggccaaactgtgcgaactgctggcgaaaagaaccggaaggccccagccctcttcttacatgctgatcggcatgttttcgctcatcgatacgcttctccacagggaactggaggatatcatcaaagaactgcctttaatcgatgaagtcggacaggcgctgctcggttatgaaaacgattattataagatgctcgcgctcgtcaaagccattgaatgcaacaactgggactgtgacgagtggggaaaagaactgaacaaagaagaagcgtatgaatgttacttacaggcgatcgaatggtgccggcagctgatcgattgagccgctttaagccgaccatctgagggcgatgataaaccggctttgctctctgatcagactgacacggatgccgtcgggattatacgtcacgtcaaagtcatttttgatgccggtctgcttaatgagccgcttgaccgctgcggtgtcagatgattgcgctgcggtgaggatgctgcgcgcaagctcttttgacgccgacagccgcgcaaggagcaggcgcgcatcctccagcatgcccgcagcttcttttgcggacgctgtcaaaatatctgcgtgaaccggggcactgggcgctggatgccggtatggcgcggcgaaaacagggcagcatggatacacataatgcatacggcggcctccttcctgagaaaacattcgttatacatgagtataggcggcgtgataatgagttatgacatgcaaaaagaccacaatgcgggggttgcggtcttttcggtgtttgtcggtggttatgcgacgctgtttgcccattctgttttgaaattgtgacggcagggactatagtccctgccggtttgtcggaaaaccgttgaaaaaacagcagaaccgccagattggtctgctttatcctaaacgtctgcctttgcggtagttatatagtcctgttcgctaaatgccctgttcgggactatggaattaccttggtttgcggtgtcacgcagatacttttacacatacttttcggtgaaaaatcccgcaaaaacgtttacactattagtaacagatcaaatacctaggactcgttcaccatacacaattcattgatctttcaaaaaaaggagtgtggaaacggtggaaaacaaattagaagaagtaaagcaattattattccgacttgaaaatgatatcagagaaacaaccgactcattacgaaacattaacaaaagcattgatcagctcgataaattctcatatgcaatgaaaatttcttaaaaagacttggaaacaagtcttttttttgtgcattttttatccatttcatggataaagtattatacgattgttaaaaaacgaaaaacctgctgtctttcatcacctgcatttagtaaaatagaatgggagggtgaagacaattattgagcaaatgtgtttagatgccgaaacgattaaagagaagatgaaggaaattgtggaggagaaaataaataatccacatttaaaagacacccttcagacttttataaatgaaaaaaatcattttgcttttggtgttcttgcatttaagcattatgtggctttcgatggtgagcattattcggatattacgttattagcttcaggaattgaattgttaattttagcttttgatatttttgacgatatagaggatgaagataacttggataaggaatggatgaagatagatcaatctatctctttaaatgcagccacttctctttattcaataagtcttcaagtgatttgtgagcttaaaacgaactccgattttccccggcttgctatgaaatatgctttaaatgcaatgcaaggtcagcataatgacctcgaaaatttccccgaaactgaagacgaatgtcttcaaatgattaaacaaaaatcaggctcgcttactgcaatgtcagctgtattaggaacaatgcttgcaaatggggagtttaacgaagaaattgagaattattcctataaaattggaattgttaaacagattgaaaatgattattatggtctttttaataaaaatcgtagtgatatcagaaagggaagaaaaacattaattctgttgtatctaaagcgaagatttaatgctgcttcagaaaaaatcttggatttaatgaatgcagaagcaagttaccattcattcctcattgataataaaaaaagccttgaagacctactatttgatgcaggagttagccagtatgtttcaatgttaattaaaatgtacgaggaagaaattacgacaagtataaaagatttaaatataatgttagaactttaatggaggaaattacagtgaagcaagatatcgtacattatcttatggaaaatccacttgtacttacaaagttagcgtgtggggaagctagtttaataggagttccggataaactgttacctgccattgttgagatttttgaaagggacttaagtcaatcaaaaaaatgcaggggaattttttgggaacaatgattgagagagtgagatctattgaaaaaattcattagaaatttttcgattgtattgttattcgtcagtctcttttacgtcgctcatattatatattttactcaaaacggaattttggtaggaacctatgtggttgaaaacaataaccatgaattgcaggttgtaaaactctccaagtctacgtatggtaaatatatgggcttaaaagagggagacaggataattgaaataagcggaaaaacaccgacagaagagaatataagaggtcaatatctagcgaaagctgaacatatgaaaataataaggggtaatagtaaaatagacttacataatactgagtttatttccttaaatagctcttatagtttttttatctatattatcccatgcatattatttgctttaagcatgttatgcattttttatatttataaagttaacagagtaaaagatacttattcagcctttattttgattatttttttattgtgtacatccattgcatatttaagcgcaggtggagtaactagaggatatgaaataaacagatatattaacctttttacatttttgaacgtacctgtattatactttcactttttgtatcaatactttaaagaattaaaattgaaattttcagctggttatgttgtgtctactctctatatattgccggttattaatataataatcgagatattccagaagcattttgccttccaacttgttacgaatattaatttagtaacattttttttggaaatgatggtcgtctatacatccattattttttatggactagtctaccgaaaaaaggatcacttttatttgctgaaagtattacttatatctaataccatagccttttttccgtttacagtattttatattatacctgaggtgttgttcggacagtatatttattctgctatagttacggcaccatttttaataattattccattagctttagtctatcaattcgtggtcaataaaatctacgatatagacttcttgttgggcagaattagatactatggtttcctttccattattccgactattggagttgtatggctgaatatattattcgacagcaaggggaataactttaacattattcaaatcactgtatatgtatttttgatttttttagcggtattttatattaaggagttattagactacaaatttcgcctgaaacgtttttcagaaaaatataattatcaagacagcatatttaaatatacacagcttcttaaaagcgtatcagctttaaaccaagtgtttatgaatcttaaaaagacgatattagatgtgttgcctgtcagtaaggcatatatctttgaaatcagttctgacggagatattctgtattttgataaacagaacagtgaaccgaactggcagccgtataaaaaagaatttgttaaagtctcatcagagattggcaagatttttgaagtaaatcaaggttttctgatgaagattggagaaagaggggcaaactcatacgttctgctttgtttgtcgagcattaatactccgagactgacaagagatgagatatcttggttaaagacattgtctttttatacaagtgtttcgatggaaaacatattgcagatcgaagaactcatgaaccatttacaagacctgaaacaacaaggctcaaacccggtctggctcaaaaagctgatgtttacgatcgaggaaaagcagcgttcggatttggcccgtgatctgcatgattcagtgctgcaggatttgatttctttgaagcgccagtgtgagctgtttctggccgattttaagaaagaggagccttgccagttagaggtgcaggacaagcttcatcagatgaatgagcagatgtcggatgtcattttgatgacccgggagacgtgccatgagcttcggcctcagctgctgtatgatttgggtctggtcaaggcggtatccaagcttgccgcgcagcagcaagagcgtgcgccgtttcatatccgtctgaatacgggccggtttacggcggcgctggatttggatacgcagctgaatttgtaccgcattattcaggaatttctttcgaacgccatgaagcattcacaggcgaatgaggtgctgattatgctgatcagcattcaaaataaagtgattctgcattatgaagacgacggtgtcggctgcaatcaggaagaaggcggcggacagtcgatgagcatgggtctttcgggtattaaggagcgcgtccgtgcgcttgacggacggatgaaaatcgacacaagtgaaggaaacggttttaaagcggatattgaaatggaattgtaaccattttatcaccaaatcgacttggcagaagccaagtctttttaataaaatggaaatgagtgagtaaaagggaggaaaccatgaaaaagatactagtgattgatgatcatccggctgtcatggagggcaccaagacgattctggaaacggacacgaatctttctgtcgattgcctcagtcctgatgccagtgaacaattcgttctccggcatgatttttcagcttacgatctcatattaatggatttaaatctgggtgatgacatcagcggcatcgagctttccaagaaaatcttaaaagagaatcctctctgtaaaatcattgtctacacaggctatgaggttgaagattattttgaagaatccatccgcgcgggcctgcatggcgccatcagcaaaaccgaatctaaagagaaaatcatgcaatacatatatcacgtgctcaacggacagattttagttgatttctcctatttcaaacagctgatgacccagcaaaaaacaaaaacgtcttcttcccctcaaagtgagcaggatcggttaaccccgagagagcgccatattctccaagaggtcgaaaaaggtttgaccaatcaggaaatcgcagatgcgcttcacttaagcaagcggtcgattgaatacagcctgacatccatttttaataagctgaatgtcggctcccgaactgaagcggtgctgatcgccaagtcagataacgtactataaatcttgaagggagaatgacctatgaatctgaacaatacattgctcggcgcactcggtattgaaatcactgaaaacacgccggagagatgcgtggcggtgatgccggtggataagaggacggtgcagcctttcggatatctgcatgggggcgcgtcagcagcgctggcggagactgctgcaagtgtcggggcccagcattttatcgaccggtcgaaacaggcgtgtgtcgggcttgagattaatgccaatcatttaaagtcagtgaaagagggcggaacggtcacggcgatagcggaacccgttcacacaggcagggcaaccattgtgtacgggattaacattttcgatgaacgagaaaggctgatctgtgtttcccgctgtacgctggctgttataacaaaataaacaaacagccggaaccctgaatcgtccggctgtttgtttttacaaatatgaatcttcttttcgtttgatcacaaagtttctgatccctttgtaatcatcctgaacgcttcttttatcaagcgccgctcccgaattgtacgcggccctgcatatgaggtgcgctccgaccggcgccgtcagcaggataaaaatgatgccgagcagtatttttacagaaatttctccggtcagcatccacaagtagcctaacaccccgagcaataccaaattaacgccgagtgtcgagccttttgaagaggcgtgggcgcgcgtatacacatcaggaagcctgagtgtgccgaaagacgcgaccaggcagatcagcgatcccatcagaatacaaacggcgacggcccatttaacgatttcgatcattttcgataatctctcctttctccaaaaacttagcaaaggcaatcgtgccgataaacgataaaatgccgagcagcagaatgatgtccaaaaaggccgatgtgtttaagagaatggatacaagcgcggtcatggcaatcagattaatgccgatcccatcaagcgcgacgacccggtccggtatcgtcggccctttcatgacgcgaatgacgtacagaagagtcgaaaccgccataatgccgagtgataattgcagaataaacgtaaacatcagcggctcacctcctgaatggctttttcaaaagagacgcggatgtcgtggatcgctttctccgcatcttcaatatccatggcgtgtatatagagaatcgaccggtcatcggagatatccatcacgagcgtacccggtgttaaagtgattaacagcgagagcaacgtgatctcccaatcctccgtcaattccgtcttaaacgcgaaaatgcccgggcggatgttcagtttcggcgctataacggttttcagcacgctgacattggccaaatataattcctttataaagatcagcaccagtctgatgactgaccatattttccaaatgtaaaacggccgcgagaagaagcgccggaaaaaaaacagcgccgccaagcctgcgataaatccggttataaaacccgccgtgctgaggctgtttgtgagaaacatccagcaaacagcgagaagaacgtttaataatagttgaaaagccatgccatctactccttcaaaacagcttcaatgtatttttccggattcagcagattctcagccgtctgattgacatacggtgaaacccattcggttccgagcccgaacagaagcgacaaaaggagaaaagcggctgccggataaagaagtccttttgcggaccgtccgcctgcgccggggatttctttttcttcgccccaaaaagccgtcgtaaaaaccttcagcaccgaatagagcacaagcaggcttgatacaagaatcaatacggaaaacaatgtttcccccttatcgaacccgccttccgcgatcttcagcttgcccacaaatccgctgaacggcgggatgccggccaaagatatggctgaaataaagaacatccatcctaaaacgggataacgggtgatcagtccgcccattttatgcaggctggcagtgcctgtcaatgcgataagcgtgccggcaagcataaacagcgctcctttaatcagcatatcgtgaatcaagtaataaaccgctccttgaatggaggccggcgtgttcatggcaatgccgaacaaaatcacgccgacggctgtaataatattgtagatgacgattttcatgacatccgaaaaggcgatagatccgattacgccgaatagcaccgtcagcatcgcaagccacatcatcaattggtgggtaaagcccgtatcgtgaataaagatcagggtgaatactcttaaaatggcatacaggccgactttcgtcaaaagagacccgaataaagccgaaattgcagccggcggggcgtaataagagcccggcatccagaaatacagcgggaatatcccgccctttaaaccgaaaacgacgagaagaaggatgccgatgacggttatcagcccggtctggcccgattcgcttatttttacgcttagatcagccatattcagcgtgcccgtcaccgcatataagtaaccgacaccgatgacaaaaaacgcggatgacacaatgttaaacacgatatacttcaatgattctcttaattgaattttcgttccgccaagcacgatcagcatgtaggacgcgataagcagaagctcaaaaaagacgtacatgttgaacaggtcacccgtcaaaaacgctccgcttacgccagccagaagaaactgcacccctgaataatagaaagcgcgctcccttttttctccgatggagcggaaggagtacagggtgacgagcagcccgattatggcggttgtcaaaacaagcagtgcggcaagctgatccgcggcgagcacaatgccgtacggcgctttccagccgccgagtgtcagcgtctgaatcccgtgtgtgaaaaccgtctgaacgagagcggcgctgatgacgatggagacacaggaagcggcagtgctgaatatccgcatcagcatcacgtgcctgttcataaaaatcagcagcactgcggcaagcagcggcaccagaataggcaatatcacaaagttattcatgttgatcatttcccctcattcgatccatatcgtccgttttcagttcctgataggcgcgaaacgccatcacaagcaggaaggacgtgacgccgaacgaaataacgatcgccgtcagtatgagtgcctgcggcagcggatcgacaaaggacgtgctttttccgcccagtatgggaggagcgccttttttcagtccgcccatggtcaggagcagcaaatggacgccgtggctcaaaagcgcggtgccgataatcacgcgcagcagacttttagaaagcagcaggtaggttgccgccataaacaaaataccggcaatgacagacattaagatttccactattcttcctctccaatcgtttgaataatggtcatcgtcacgccgacaacaacgagatacacacctaaatcaaacaaagtggccgtcgcaagctccgtattcccgagcaccgggagatgaaaatggccgaatgtatgggtgagaaagggcgctccgaataagaacgaacctgcacccgttgcaatcgcgataagcagacccgcgcccgccacataaataaaattgacgggcaaaatcgatttgacggtttttaaatcaaaggccaaaagcagcagcacgatggccgaagacgtaatcagtccgccgacaaatcctccgccgggggcgttatgccccgataaaaataaatagaaagagaaaagcagaatgataaaagatacaagcttcgttgccgtctgaaggatgatgtcgtttgtttttggctgtctcaacgcttttctccctcctctgttacttttgttctgatcatgccgtaaatcccgagtgcggcaatcgacagcaccgtaatttcaaacatcgtgtcaaatcccctgaaatcaacgaggatgacgttgacgatattgtttcctcccccgagcttatggctgtaagcggtgaaaaaggaggagatgctgtcttttgttttttcgctggaagacgcgattccgagcattgtcacgatgacgccgacaccgagagaaatgataaaattcgtcatccggaatgttcttgtcttctttttccgccgcattttcggcagatggtaaaaacaaagaagaaacaaggcgacggatatcgtctcaatgacgagctgcgtgagcgccagatcgggcgctctgaaaatcacgaaaaacagcgcgagtgtgtacccgacaacaccgagtgagataatggccgtcagccgtgatttggcgaacacagtcgcaatcgttgcgttcaccataacgagggacagcacgatttcatacaggccgatctcagccattcctttcgctgtcatggaaaagccgcctttcatgacgaacgccgctccgatgagaatgataaacgacgcaaagatatacagcagataatcccgcaaaaatccggtcatataagatgacgtcagctggtaagatcttttttccatactgcccgtcaccgcatcgtaaagcttgttcagcgtcagttttttcggaaacagaccgtacagacgctcccatttagacagcgttacgtaaccgatcgtgccgacaatgatgatgccgagggtcatcattacctcagccgtcaccccgtgccactgggaaatatggacatggaatgtatctccgccggttaacagagcgggataaatggagttcatcgccggttcaatcaggctgtaagacaaaacgttcggagcaaaaaacagactgacggcgcaagcggcaagaatcaccggcgaaatcagcatgccgagcggagcttcatgcggcgtcttttcaagctgatccgttttgcgcgcgccgctgaacgttctgaaaaacagcttcatgctgtagatgaaagtgaagacgctcccgatccatgcgagaacggggaacagcacgccccacgtatccaggctgaaaatatctgcatgagcaatccgcagcatacttgtaaagaacatttctttacttaaaaagccgttaaacggagggagaccggccatggaaaacgttccgatcagtgaaacggtgaacgttaccggcatgagcgccatcaggccgccgagcctgcggatatcccgcgttcccgtttcatggtcgataatgccggccgccataaataaacttcctttaaaagtagcatggttaattaagtgaaacacagccgcggtgacagccgccgtaaaatactctgaatgctcataatgaagcgcggcggctcctgcgccgagcatcgatacaatcataccgagctgactgactgtggaaaatgccagaatcgcttttaaatcggtttgtttaatcgcattaaaggaagcccataccatcgtgatcagaccgactgaggcaaccgtccaaaaccagacgggtgaaaaagcaaaaaccggactgaatctggcaatcagataaatacccgctttcaccattgtagccgagtgcagataggcgctgacaggagtcggcgcctccatggcatcaggaagccagatataaaacggaaactgcgctgattttgtaaaggcccccaataacaggagaaccatcgccggaataaagaacgggtggcctgcgataatatgcacctggttgaccatttccctgatactgaaagaatccgtcatcagatacagcaggataaagccgccgagcatgcacagcccgccgccgacggtaatcagcagtgatttttccgccccgtagcgtgatttcttccgcttatgccaatacccaattaataagaaggatgacaggcttgtcagctcccagaacatataaagcacgatgacgttatcgacgagcacaacgccgagcatcgcgcccataaacatcagcaggtacacataaaaagggccgagcttttctttgtccttcgataagtaaaaaatactgtaaagcgtcaccaaagagccgatgcccgtaatcaataaagcgaataacagcccgagtccgtcaatataaacggtatagttaataccgagggacggaatccattcggccgcataccggacggtttctccagccattgtgacagggagcttgctgataaagtaaacaaacagcacaacgggcactatcagcacaaaccagcctgtatggacttgttttacccgtttataaagaaagggaacgataaatgcaaataaaaaaggcgccaaaatcgcgaaatgtaacagctgcaacagaagacctcctttgcttgttttttcatcaagcaactgctttatgtaagaatgaatcaatcaattcacggtcataggacccagtacaaattatatcgcacttttttttaccctgctacggcataatgtattcctctttgtgtttttgtggtcttttgaacccaaaataaatttatcaaatatccggatctttgtatatacatttctttttcagatcaagctttacaaaaggagctggtcagatgaagagaaaggcggcggcctgtattggaatattttgttctattattgcaggaacattcatagttgatgatttctgcaaaacgcggcagcagacggaagcagatgattgggagcatttttttctcggtgcggaatacgcagaagacaagctgagtgcggctgaatcaatgcaaacgccgtttcagccgcgtgagtatatcagaatcgtatatagatgaaaagagttccggcaccagggtgcggaactctttttgtgtggcaatcagcgttttcctttaatataagggatgccgttggctttaggcgcatccgcgcggccgatgaagccggcaagcgcgagaatggtcagaatgtaaggagccatcagcatgtatacattcggaatgtctttgaacaggggcaaaagcgagccgataatgctcaaactctgcgcaaacccgaagaacagcgcagccccgagcgcgccgatcggatgccatttgccgaaaaccagcgcggcgagagcgataaagccttgtccggaaatggtggagtgcgtgaaatcaagcgcgatcgtggaagcatacacaccgccgccgagcccgccgaacagcccgctgatcatgacgccgatatagcgcatgccgaacacgttgattcccatcgtatcggccgccatcggatgttccccgacagaacggatgcgaaggccgaacggcgttttgaataaaataaaccaggaaacaaaggccagtacgatggctaaaatcgacgtataatatacgtctgaaaagaaaatctttcctaaaaccggaatatcgcttaacccgggaatgttcgttttgtaaaagggctccgggattttatcagtctgcgcctttccgtaaatcagtttgacgataaacagtgtcgctcctaacgcgagcatattgatcgccacaccggttaccgtctgatcggcgcggaaagaaaccgcggcagccgcgtggatcagtgagaacagtccgccggcaatcatagccgcagccagagcgagccacggagcggcggcgccaagctcgcgtccgaaaaataagttgaacatgacgcttgtaaaggcgccgataatcatcagtccttcaagaccgatgttgacaacccccgatctttcagaaaacacgccgccgagagcggttaaaataagcggagccgcatatacgagtgttgccggaacaataatggataaaatctgcaggaagtccacttacttcgccccctttttcttcaatttatcaaggatgagacggatggcgtagcttgatgccacaaacaaaataataatggcgatgacgatgtcaacgacttcagaaggcaccccggattcaatcggcatatttaatgccccgactttaaggccgccgagaagacatgccgccagaacaacgccgattgccgtgctgccgccgagaagcgcaaccgcaatgccgtcgaagccgacgccggtaaaggcgcccttaaccgccgcatattgaaaggttccgagtccttccatcgcgccggcaagccctgcgaaggccccggaaatcatcatggcgtacatcatattttttctgacgctcattccggcgtattgtgcggcgtgctggttaaagccgacagcccggaattcaaatccgctttttgttttatgaatgataaaccacatgaggactgccgcaaacagagcgatcagaatgccccaatgaaggcgggagtaatctgtcagctgctctaaaaacggcgagcggagcgacgcgctttcatgaattttgtctgttttgtcccggtggtccgtcatgacatcggaaatgagataattggttaaatgaagagcgatataattcatcatgatcgtgacaatcacttcgtggacaaaaaaacgggcttttaaaaatccgggaatcaggccccaaatgccgcccgcagccgcagccgccaataacgaaagcggaaggtggatgtaagcggggcgtcaaaggaaacgccgacccacaccgcggcggtccagccgacaaggagctgtccttcaaccccgatattaaacaggccggtccgaaatgcgaatgccacggccaatccggacagaatatatggcgtaatctgccggatcgattccccgatgtaatacacttcaccgaaaatgccgctccaaagagccgaatacccgcttacgacattgtagccgctggcgagcatgatgaccgcacccgcagctaatccaaggatgatcgcaatcagcggcacagccagatgagaaagtcgattaatcatgtgttttccccgcctccatttgcttacttcccgccattaaaagtccgagctcctgctcgtttgtttcaagcggattgacgtttgcgatgatgctgccttcaaagatgacggcgatgcgatcgctgagattcattatttcatcaagttcaaaagataacagaagcaccgctttaccggcgtcacgctgctcaatgagctttttatggacgaattcaatcgcgccgacatcgagtccccgcgtcggctgggccgcaattaaaagatccggatttctgtccacttcccggccgataatggccttttgctgattccccccggagagagcgcgcgcaggcgtatattcatcaggtgtcctgacatcgtattcttcaatcaggcttcgcgctttgtcataaatcgtgtgtttatttaatatgccgaaagaagagtagggcttttggtaataactttgcagcacgatattttctccgatcggaaaatcaaggacgagcccgtgtttatgtctgtcctgcggaatatgcccgattccggcttcagtgactttcctgggcggcatattttgcagctgtttgccgtttaacatgatcgtgccggcatttgtttttctgagacctgtaatggcttcaattaattcagactggccgtttccgtcaacgcccgcaatgccgacgatttcaccggctctgacagagagggagagctgtttgaccgcctcaacgccgcgcgcgtctttcaccgttacatcagaaagcgaaagcacttcttgtttcggttcagccggctgtttatccgtcttgaatgacacttcgcgtccgaccataaggcttgccagttcatcttgatccgtatgtgcgacatcaagtgttgtaatgccttttcctttccggatgatggtgacacggtcgcagacttccataatctcttttaatttgtgggtgatgaggataattgattttccttcattgacaagatttttcataatctgaatcagttcttgaatttcgtgcggagtcagcaccgcggtcggctcgtcaaaaatgagaatgtcggcgccccggtagagggtctttaatatttccgcccgctgctgcataccgacggagatatcggcaactttggcttcaggatcaatgtgcaggccgtaacggtcggaaatatcacgcacgtcccgggcggcgcgctgtctgtcaattcggccgaaagttttcggctcttttccgagaatgatattttctgagacggtgaaggtatccacaagcataaaatgctggtgcaccatcccgatgccgagatcgttggctttgttcggactgttgatgtgaacgcgttcgccacgcacccggatctcgcctttttccggctgatacaggccgaataaaacgttcatgagtgtcgattttccggcgccgttttcaccgagaagggcgtgtatttcgccttttttcacttgaagcgtgacgtcatcattggcgacgattccgggaaattccttgcgtatattaagcatttcaatgatataatccaccgatttgtcgctccttttcagagatactttgatgagaaagagcttggcaaaagaaaagctgcaagagatgcagcttttccttcaccgctcttttcaaaaaagagaggggataagcacgaaagtctccttatcccctggttcttactcagccttgaaggatttcaattctttttcagttgaagggatcacgagtccgtccgcgattttcttcttccaatcgtctgttgctttgatgacatcgtcagaaaggttctccttgtgatccgagatgccgactgcatcttgcgccaaaccgtatgttaatgttttgccgcccgggaatttaccgtcactcgcttttttcgttaagtcctccacggcagtatccacttttttgaccattgatgtgagagtgacattgtcttttgttcctttgacttggccttccgcgtactggtctttatcgacaccgataacccatacgttccgcttcggatcttcttttttcagatttttcgcttctgtgaagacgcccgttcccgttgcgccggccgcgtgataaatgacgtcaacgcctgatttgtacatgctttcagccgtcgccttgccgacatcggctttgtcaaacccgcccgcatatttcacttcgacggtcgctttcggatttgcggcttgtacacccgcgcggaagccgatttcaaattttttgatcaattcggactccattccgcccacgaatccgacttttcccgttttgctcgatagcgcagcggccgctcccacgaggaatgaaccttcctgttccttaaatgtaaggctcgccacgttgtcttttttgacaacggcgtcaatgatcgcaaaatgtgtgtctttgcgctgatcggcgatttcgctgatggaatcctgcatcagatacccgacgccgtaaatcaggtcaaagtgttcccgcgctaatttatttaagttcgttgtataatctgcatctgattttgattgaagatagtcaaaaccgcttttgccttttttaagcccgttgtcttttccgaatgcctggatgccttcccaggcggactggttaaatgatttgtcatcaacaccgccgatatccgttaccatgccgacggtaaagtttttgctgccggagccgtttgctttgtcacttgaaccgcatgcgcttaatatggttccggccgctgcgatgagcgccatcgccattccgattttgcgttttttcaaagatataacccccctgtaaaatatggctgtgccgttcaattcagacttgagtccccgtgccggatgcagaatcgaaaaaactttctgataataatgatgagacgtctctctttttcccgccttgagcggctgtctcttccgggttcgggacttatgacttatctgaaaagatctgctaaccaatcataatttatcattttacccgccataaataaatagaaatttgcttattttttaaaaaatatcaattttatgaatcggcttcctcatctggttaaaacagaggaggatcagccgggtcattatccttatatagcatatcaaaaaggaatctcaagccttttgtcacgggatatgacagtaaaaaagcaccgttcacagcgaaacggcgctttttgacattataaatattgtttgatgctgctgacattgccggtgttgatatgatattgaaagacgggtctgccgatcgtgccgtacgccatctctacattcagcacttgtatgtcttccagaaatttaaggtatttccggatggagacttgcgagatttcagtatgcttggcgagatcttccgtggtaaaagagccgtcgccgaaagactcaatgctcgcccagatgagtttaagcgtgctctttgtcaatcccttcggaaggtgaaccttttccgccgcttctttcttttgaaaaagctcggcatccaattctttctgtgtcatgcttctgtgtgattgataaactttctgcttgcgtctgtagtcggaaagagcggtttgaaagcggtcaaattcaaatggtttgattaaataatcgacggcgccgtaccgaagcgtttttttaatgacgtccagctcgcttgcggccgaaatgacgatgacatcaaccgattcattctgcttgcggatttccgttaaaagctcaagcccgttttttcccggcatgtaaatgtcaagaaggatgagatcgatatgatgctcgctcagcacgtgcagcgcgctttgaaaggatgatgcgatccctttcagctgaaatccttcaatctggctgagatagcgcttatttaattcacccaccatggggtcgtcttcaactatgagtacattaatcatcattttcctccttcggttcatacggaatgcgaagactgaaagtcgttccttcattcttttcacttgtcacaatcatatggccttttaaattttctgttgcctgctgggtgaaatagaggccgaacccccggtttgtccctttcgtggaataaccttgttcaaaaatacgggcttggtctgccgcagacattccggctcccgtgtccgtaatctctatgtcaagctggcgatcctgaaaccgcatcgagcacgtaatgttttttttcggcatctgcgccaccgcgtcgagcgcgttgtttaacaggtttccgataatcgtaatgagctcatggatgacggccggatccgccgcattcggaatcaggctgccgagctgaatgtccagatcagcgccctgctcgcgtatgtagctttgttttcccagaagaaaccctgcgagaaccggacttttgacatcacttataatctcgcttgtttccgtcttctgctgaatggcaatgtctttaatgtaagtgccgagatcatcgtattcttttaactggacaagccctaaaatgacatgaagcttattcatgaattcgtgagactgggctcttaatgcgtttgcatacattttaacaccggacagctgttctgctaaatgtttgacctccgttttgtccctgaacgtggcgatcgctccgacggtttgtcctttcagatgaatcggaacttcattaaagaccagctcaagtccgttaatgcggatatctctgtcctgaagcggttttttcgtttcaatcacctgtttcagccggcttttcgggagaatatcgttcacatcttgatcgaccggattagtcggaatacccattttaataaaaagtcgtttcgcctctgcattggcaagcttaatttttccccgcgcgtcaaccgcaaggatgccttccttcgttgattcgagcatggcgctccgctcttccaggagggtggcgatttcataaggctcaagaccgtacataatgtttttgacggtgcgggcgacaatgacggctccgatgacgccgacaaaaatacttacgcagatgatgaaataaagcggtctcaaactgtggctgacgacatcctgtattttgttaagcgaaattccgaccgaaacgacgcccacttgttttttatcttttccatagatcggtacgaaggctctcatggattttccgagagttcccgctgatgtgctcgttttgatatggccgtgcaacgccggctgttcgtctccgccggtgaatttcttcccgattttatttgcgtcggggtgggtgaggcggatgctgttcatatccatcaccacgacaaattcggttcctgtcgtatgctggacatccagtgtataattccggagctctttcagcccttttcttgtttgcaatgcctgcgcgacactcggtgtttccgcgacaagctttgcggtgcgcagcgcggttgtccgttcttcttctttcacgcggtccgcggtctggacgctgatcgtgaaaaaggtgatacaaagtgcgataaggacgacaatacagacgaatatcgttaaccgggtttgcaattttaatgtttttttcataacagccttccttacgtttatcattcccgcgttctactttactccgaaaaagccggtttgtgaagatcaggcccttatttcgtaaaagtgaggaaaaatggaattttttatcttgtcaatgtgttttaagtcctccataataagtgaggtagattacagaaagggactttttatatgaaaaatacttattggacgggttattttccgctcgttgcgattctgctttttagttcgtcattatccatttctacctcgctttatgtcatgaagatacttcagacgctcggcatgtatcaggggatgctggattatttctctgagaaagggatcagactggcgctttttgcagcgttcgcccttgtgtattttatgcttttttcggctttgaagctgattgcaaacacagtgacagagctgtctcttttgtttttcacaaatgaccctgagggggacaatctgaaaaaaatcagattaggctctttaatttatgtaggcggaggaattctttcctttgcgttcgtgcagaatggtttttggattgcggcgttatttgccgttgttacgctcatttatttgattttcatggtgtacagaatctattcgacactctcgatcgtttcgctgatcggttttatattgcttgagattctgttttggtttacttttgttatcggtattttgtacatctttatcaagctttataatagcataatggctagcttacctgtgtaagctagccatttttgttaagacagaaatctgtttttgatctcaggggaggggagcatgcatgcttccctttttccgaaccatttgtaacggcgccgggcgatgaaagaataggctctgtccctgaggggcggggcactgcgaaaaaaaccgctgacagccgccaggctccgcggagatgacgcgaaacctttaacacggctgcggattttttgtatatccgcccgttttcgataaaaatcatgctgtcaaattgttctgtcggaagtccttctgatgccaaaagctcccgggcggtatctgattgcaatgaagcaaatgagattttgccggccggatcgcgtttaatgatgaattgaacggcgccgctgcataagttgcagacgccgtcaaacaaaagcacgcggtccggaagctgagctggtttcaaagcggatcccctccgttatctttaataagctgcctgcagcgtgtttttccagatcgaaagctgagggcttgcgtcatgaaggtattcgacgcttgacggtgtatccttgccgacccataccccatcgtataagcgtccgtcaggccgacaaaccacatatcgtgatagtcatttgacgttcctgattttccgccgacgtacggagctttaaagttcgctttttttcctgttccgcttttgacgacggctttcatcatttctttgatctgcatgttggtccgcacgctgaatacctgcgccggctcatctttccattttaatatcgtttttccttttaaatcagtcacttttgtaatcgcgtgactcggcgtataaacgccgttgttgccgaacgtggtgtacgcattggtcatttcaagcggcgtcatgccgtttgtaaaaccgcccagcgccgcaggcaggcggtaatccgcgctgaccagcttcgcgaaatgaaacggttcaaggtagctgaacgccttattgacgccgacgcggtccatgattctgatggccggtgtgttgtacgagtatttaaacgccgtttccagcgtaaccgtgccgtatgtgcggttattatagttctgcgggcagtaatccgcactgcagaatttgcttgcgtcaattttgctgtgtggcgttgcgccggtcttttcaatgtaaggtccgtaatcaagcagcggcttaatggatgaaccgggctgtctgtatgcttgataggcgcggttgaaatcatatttatgataatctttcccgcctgaaagcgcgataatctgatgtgtctgatgattaatcacggccgctccgccctggacgcctgcatacggcagattttgattcacttgggcgacgacctggttttgcatatacggattcagcgccgtataaatcttcacgccgtcttttaacaatgtgctgactctgtcggaaagctcactctgtattttttgtttcgcctttccggaagctttttcaagacgtttgtcatagccttcggatgaggaaacaagctgtgtgaattcatcatttacataggaaacatagtcaggatatttatttgttttttcgtttatatcaagcttgatcttttccttttcggcttttttcagctgtttcccggatataacgcctgcttttttcaatccgttaagcaatctgacttgtcgttttttcgtataatcaaaatgcttgagaggatcatataatgtagggttattagggatggcgcagataaaggccatctctcccaaagtgagagatttcagcggcttgctgaaataaaattgtgccgccgaaccgacaccgtatacaccgttattaaaataaatcgtatttaagtagccttctaaaatctcatctttgctgtattttttctcaagctgataggaataggccagctccgtcagttttcggctgaaggtgcgttcatggcttaaatacacattccttgccagctgctgggtgatggtgctggcgccctggtcaattttatgatctttgaaattggaggcggccgccctgaccatccccataaagtcaaaccctttatgctcataaaaatggcggtcttcagaggttaaaaacagctgttttacctcattcggtattttattaaagggcacgatcacgcggttctcatgatcgctgacaatctcagaaacaaggcttccgtccctgtcatacatgtaactgttttgaaccaggttgatcgcttttaaatcaatatgtttatcgagcacctgatcaaaaggcttgatttgttttacctctttgccggaagcaataactgtaaatgcacacaacgggataatgccgagcagcaaaatccatccgattattttacgtaccatggtcactctcttttctcctgatttctagccatatcgtatcattcttttaagaatacgagaaggttaaatttagaagaaatcgtgatcgctgccggtcagcccgcatttgacgctgtatccttttgcagatgtcccgccatccataaaagccccgcgcctataaaaaagagaaaggcggtgacgtagaaagcagccgaaatagaaaaaccgcttgagaccgcacctccgagcagagggccgagcacgtttccgagaaaacgaaagctgacgttatatccgagcacctctccctggatgctgcccggagccctgacgcggatcgcggccgtaatgcaggggagcgtgccgcccatgaccatgccgaacagaaatctgaagactaacagaatggagagggaggaggcgagcgcctgcggaataaaaaacaccgctgatgcaatcaaaagcacgattaagatccggctgtggccgaagcggtcgccgaagtcccccatttccgggcaagcaataagcttccgagtccggtcgctgaaaacgccattccggagaaaaaggctaaattaacaggtccgtgcagctcattgacatataaagcgagcagcggctggatgctgaaattgccggtctgcacgatcatggtaagcaccatcatcgcccaaagcgcgggctggtgaaaaatataggagagcacctgttttctggaataggttttccgcttgttttgtttctcgccgagcggctgctcattcacctgaaataaaacgagaagcacagatgcgaaaatgacaaaagacgtaataaaaaatgtgtacgtaaatccgaagctgtcagcgagcagcccgcccagcatcggtccgaataaagtgcctgacacctgacccatctgcagcgtgccgagcgttttcccggcagtctctttcggcgtctgcgccgaaatcatggcaagcgaagtcggaacaaagcccgttacaaggcccataagcagccggaggacaaacagctgataaacggatgtcacaaaccccatcaataaaatgctgacggcaatgccggtgcctgtgatcaagagaatttttttgtagccgcgcttatcgccgaatctgccccaaaacggggaaatcacaaacgccattaaaaacgtgacgccgaacacatacccgctccatctctgcacatacccgcccgaatgggggctgatcgtttcgatatataacgaaagaaacggaacaatcatggtcatgctggcggaaataaagaaatttgtaatccaaatgacgacgaagttcttcttacggacagaaataacatcaccttctttaattttcgtgtgtctaatcattagtatataggaatgaatccggtatttgtattttcgatgcggatataggaaaattcattatttttagaaaatgaagaaagtttcagaggggaaactgatatactatcataaaatatcatttttgatcggaggaaaggcaggtgtaaaaaagtggatcagcgcagtctgctcattattgattttgaatttacgatgcctgacggaaaatacagcccgcaaaatttctttcccgagattattgaagcggggattgtcaagacggtgaatgatgaagtgactgaaacgttttcgagttatatcaaaccgaaaaaatttccaaagctgacgaaacgatgcaaaacctttctgaacatcacccaaaaagacgtggacggcggaatcacgtttaatgaattcatccgcaaattaaatgagcttgatcctgataaaaactgcacgatcgtcacctggggcaatatggatatgaaagtgttaaagcaaaattgcatgtttaaccacatcccttttccgttcaaaggagaacttcgggatctgtccctagaatataaaaacttctttggcgacagaacattgaccggcctttggaaagcggcggaagagtatggcgataaagggacgggcacgcatcataaagcgctggatgatgcgcggacgacatacaaattattcaagcttgtcgagcgggataaacaatatcttgaaaaaccgaaacccccgacgatcggtgatcgcgtcgatctgactgaactgtttcgacgggccacataaaaaaacccaatcatgccgactgggtcaagttcttttaaaatagtcacgctctaacgcggccaagttggcgagcgaacgttccgcccattctgagccgtccgctgtaagctgatctttcagccgggcagacgccgcttgtaaggaagccgtataatcaggaacttcgccatcaaacggtttgaccatctgatgcggtatgtttgtctgttccccgaatgcaagcgctcttctttcatgaaagaacggaacatccgcctgcttcggatgatgaagatctccttgagcgggatgcgtcagaacggctttaattttcactaaatagtgattgggcctgacgtctgtcacttcccctatgtatgctcctgttttataaaacccttttacgattgtgccgatttcaaacgaattcatagcgttcacctctctctagttattctataaaagatcaacgcgattggctagtgaacagctgccggaagcctgactgaagccgttgtgcccgagtgctcgccgctggtgaaatagacggagccttcatgatgctgaataatcgagaatgtcacggtaagcccgagcccggtgccattcgttttcagcgtataatacggtttgccgagtttctgcagttcttcatcggacatgccgattccgttatccgtaatctgaatgagaatcatctcttcctgtttttggacggagacctcgattcggccgttttcagagggcacggcttcaatactgtttttaatcagattaatgaaggcctgtttcagtttttttacatcgccgaacacatataaatcaggctcgctttgaacagtcacggtcaccgatttaaaattagcataagactccattaaggaacctgtttcctttacaagcagagaaatatcaaacttttctttttcatagtcatcctgcttcgccatatcgagataattcgtaatgatcgtctgagcccggtcgagttcggacagcacaagtttctgatatccggagtgggatttgtcctgaagctgctcgccgctgaacagcagctgcacaaaacctctgacgaccgtaagcggattgcggacttcatgggcgacgcttgccgcaagctcgctgacgacggccattttttctgagtgaatcagccttgcccgcatggacgcattctcatcaatgatctcaatcaaataaatgcacagcaaaagggcgctgacttgaaaaaaaacggatactgccgcctcataataaacggaagatagattttgaaaattgaaaatattggtcgcggaatagatgaagacagatgcggttaataaggcggtttcagtgcagccgatgagaagagcgaaaagcagtttcttccgctttgagaaaaaaggccatttcgtttggagctggatagggatgatgattaaaaaaggaattaaggataagaaaaaaagagcggaaggttcaaaccatatgagctgaaaaaaaacggatgctgcccctgcggcaagtcctgctgcggtaccggaataaagcaggcagacgataatgggaatcagctgcaaaccgtaacggacggaatgaagctcctggatgggaaaagccgtacataataaggaagatgacgctgcaaatacggcgaccagcaggcggttcgctctcggcacaagcaaatcgggcttgctgagccagaagacttgatagagaaaaatagggaataaaataaaagagaagtgaagcaggtaatcctttacaatctccatttatgcgaaatcctttcctatgtaaatatgaatctattataacatctttaccggcaaaaaaagtatttatttctctaaagcgaacgcccttatctcatctgataaaggcgttctttccgctgctaagagagcgctgctttcattctcttaagcccttcttttacggcggcggctgaacagccgacattaagtctcataaatccttcgccgcccggtccgtatttcgttcccggctctaatatgattttcccttttttgagcattctttctttgagctcggcatccgaaaatccgtatccgctgaaatccatccagatcaaataggaagcgtcaggtttcatcatgcggactttcggcaattcttttcttaaaaagtcctcagccaatttcatattcctttcaatgtaaggaatcagtgcgtcaagccaagggcctccctttgtataagccgcttcgattgctgcaaccgcaaatgtgttgaggctggaaatcccgttctgatgcaatgcggcggagaatttcgcccgcttataacggtcgggaatgataatggcggatgcctgaatgccggcaatattaaacgtcttgctcggcgcgacacaagtaatggaaatccgcgcaaactcctcagacagagaagcaaaaggcgtatgcggctttccgtacagcatcaagtcggaatgtatctcgtcagaaacgacggtgacgttatgagcggcgcacagcgatccgagctgcataagctcatcccggctccacgctctgccggacggattgtggggattacaaagaatcatcagcttgacctcagaatcgctcagctttttctcaagatcctcaaaatccatgcagtagacgccgttctcttcccgtaatgggttatgtaaaacctgccgtttgttttccttgatcatctgataaaaaggcgtatacaccggtgattgaatcaacaccggatcgcccggttcggtaaaggcttgtactgccatgctgattgccgtgacaaccccgggactgaacgtgatgcttgcgggatcgggccggtagccgtgccgtgtctcaagccatgaagcgacggcttctcttgtgttttcgtcaggagacgtataaccgaatatgccgtggtcaaggcgggcttttaaggcgtcagtgaccgcttcgggagcgcggaaatccatatcggcaacccacatcggaagtgcatccgatacgccgaataacgcttccgccttgtcccatttcaccgattgtgtgccaagacggttttctcgaagatcaaagttcatgtatgtcactcctgtagtatcattattttgcacagcgtatctatgataaaatagatttgcaaactttattataagcggtgatgaaaatggaagaaagccaagcggtcatggaaatgatgaaaatcattgccaagtgggacccatttaaatatggagaagatttttatgagacagaagccgtcgacatcgttcaggccgtctacagtgaagaccgtgccgacaagctggcagcagccattcaggatatctttgaagcttcatttgagcaaaagctaccgatcgaaggctgccaaaaggccgccgagcagcttctgttcataaaagaaagcagctcctgcaccccttaaaaaccggcggttccgccggttttttttattgaataaattcaaaaatccgttccgaaacaaactccgggcgctcttcgggtacgaggtgtcccgtatccttgagtgaatacagaatggaatccggcaggtcgtcatgaagccgttttccgactgagaccggaacgacccggtcttcttctccccatattaaaagagcggggttttgcactttcttcaaatcctcgggctctaaatcgccctccctgtgtctgatgaaccttgtcatcgctttgaaaatctggcggtctgtaaatggtttttcgtaaccgtcaatcatttcctgatcgataagcgtccggtcgtgaacgacatttaacaggtttttcagcacaccgtcttttgaaagccaatacttaagatacaggtcaaaacaagggaggtgcgtcccgaatataatcgacgggtgcgagcgctttaaataccccgagctgcacagcaggacgattttagaaaaaagctcgggtctgagaagagacgcggataaggaaatctggccgcccatcgaatggccgatgagtgcggcccggctgataccgagcttttccagaagtccgatcagaagcttggcgaggtttgcgtaagtatatacgaaagtccgtgacttttccgattgcccgaaaggaggcaggtcaacggcgataatatcataatggtttctgagcagcgggatcagttttctgaagctgaatgccgaagataaaaaaccgtgtacgcagacgagtgtctgtctgccgggattttcataatgctcgtaatacagttcaactccgtctatcgcggcccgtttaatcggtgaaacagcttccatgagagccttcgccgtcctttctttgttgtaatgtaaaggcttttttgattgtcagattttagttctggtttctttcgggtttttcttagcatttgtcgaaaatcgtgatataatgtcatgaagatttttgataatgcaaaggtgtgaaacgtatgaagctgacggaaaaagaaacagaaatattagaaattttagacgaaaacagccgcgttgatgcggaaacgatcgcgaaaatggcgaacattcccgccgaagaagtcaaaagcatcattgaaaagcttgaaaaggaaaaagtcatcattgattatgcggcgatgatcgactggcgcaaagtcgacggtttggaaggcgtcacggcgatgattgacgtaaaagtcactccgaaacgaaatgtcggctttgatgaagtcgctgaacggatatacagattccaggaagttgaatcagtgtacctgatgtcaggggtgtatgacttatctgtcgttattcgcggcaacacgatgtcagacgtggcaagcttcgtgtctgaaaaattgtccacccttgagtccgtcgtttccacgacgacgcactttatcctgaaaaaatataagcatgacggcaaagtctttgaaagcggagacgatgacaaaagaatcgtggtgtctccgtaaatggaaacgaagacttcttatttatctgactacgtgcagcagattaaaccgtcaggcatccgcaaattctttgatctggctgctacgatggaaggcgtcatttcactgggagtgggagagcctgactttgtgacggcctggaacgtgagggaagcgagtattctttctttagaacagggttatacggcttatacggcaaatgcgggtctttatgaactgagagaagaaatcagccgctatttagatcagcggttcggcctgagttattcgcctgacagtgaactgattgttacggtaggggcaagccaggcgcttgatctcgctgtccgcgccattatgaatcccggagaggaaatgttaattcccgaaccgtgttttgtcgcatatgaatcactcgtgaccctgacgggggcgaagccggtgccgattcagactgtagctgcaaaaggtttcaaagcatcagcagccgattttgaagcggccctgacggacaaaacaaaagcgctgcttctatgctcgccgtcaaatccgactggttccgtctattcgaaagaagagcttgaatccatcgcttccttcgctgaaaaacatgacttgatcgtgcttgccgatgaaatttatgccgagctgacgtatgatgagccattcacgagcatgggagccatccgcggcatgaaggaacgcacgattttgatttcaggtttctccaaagcgtttgccatgacggggtggagactcgggtttacggcggcgcctcccgtgatcagggatgccatgctcaaaattcatcagcacgcgatgatgtgcgcgccttccatggctcagtacgcggcgcttgaagggctgaaaaacggtcaggaagacgtcgaaagaatgaaaaaaagctaccggagacgccgaaacctgattgtggaaacattgaacgaaatcggactcggctgccaccaccccggcggagcgttttacgcctttccttccattcagtcgaccggcatgagttcagaagaattcgcggaacagctgctcattgaagaaaaagtagccgtcgttccggggaatgtattcggcccgagcggcgaaggctacatcagatgttcctatgcgacatccattgagcagattcaggaagcgctcgtcagaatcaaacggtttgttgaaaaaagggcataaaaaaagatacgaacccggttcgcatccaaataaaaggggggaatactagaaagccttcgtaatcatagtataccccctttatctgcgcttaaacatgatgatgtaaaaaagttctctttgcgaaaaacaaacttgtatgatataattttaaattgcgtataatctgtatttaatttaacttaggagttgttatgaatggcagcaaaatttgaagtgggcagtgtttacactggtaaagtaacaggattacaagcgtatggtgcgtttgttgcattagatgaagaaactcaaggacttgttcacatttctgaagtcactcacggtttcgtaaaagacattaatgaacacctttctatcggtgacgaagtacaagtaaaagtacttgcagttgacgaagaaaaaggcaaaatcagcctttctatccgtgcgactcaagcggcgcctgaaagaaaagaaagcaaaccaagaaaaccgaaagcggcacaagtttctgaagaaacatctgctccgcaaggtttcaacacattgaaagataagcttgaagagtggattgaacagtccaaccgcaaagaccttatcaaaaaataaccatcaaaaaaagcaccggatatgtatgttcggtgctttttttatgtttatctgacttccggatttgccgcttcctcgcgggatgtttcttcgttcggcttaaacagcaggccgagattgatcagaccggcgatgccgacaagaccgtaaataatccgcgacagagctgatccttggccgccgaagatggctgctactaaatcaaattggaaaaatccgatcagtccccagttaatagcgccgataatcgttaatacgagacagatacgctgaataacactcatgtaaacaacctcctctataaattcgtgaaacagttatagattgtgacaaagcaaagaatctatgcatactacattctccgccgtgtaaatcacacactgtctcaagctgtacaagtgcctttcccgggaaaccgctgtctgtaaaccgtgtgatgtgccgtcaaaaaagcggattgctttacattgaacgtcaactttctgcataatataaatccaaaggaggagatgtcatgcaaaactttacatattggaatccgaccaaattgattttcggaaagggagaggtcgaaaaacttcctgaagaaatcaagccgtacggaaagaacgtactgctcgtatacggaggcggcagcattaagcgcagcggtctttatgatcaagtaaccgacctgctgaaaaaagcaggagttaccgtacatgaattggcaggcgtagagccgaatccgcgtgtctcaacggtgaacaaaggtgttgcgatctgtaaagaaaacagcatcgatttcttattggccgtcggcggcggaagtgtcattgactgcacgaaagccatcgcggcgggcgctaaatatgacggcgacgcgtgggatatcgtcacgaaaaaacaccagccgaaagaagcgctgccgttcggaacagtgctgacacttgcggcgaccggttcagagatgaactccggatcagtcatcacaaactgggagacacaagagaaatacggatgggggagcccgctcgtttaccctaaattctctattctcgatccggtaaacacatttaccgttccgaaagaccacaccatttacggcatggtcgatatgatgagccatgtgtttgaacaatatttccaccacacgtcaaacacgccgtatcaggaccggatgtgtgaatcgcttctgcgcacggtgattgaaacagcgccgaagctgatcaacgatctggagaactatgagcttcgtgagacgattttatatacaggcacgatcgcattaaacggaatgctgtcaatgggcgcaagaggggattgggccacacacaacatcgagcatgcggtatcagcggtatacgatataccgcacgccggaggtttagcgattctgttcccgaactggatgagacatgtgctcaaagaaaatccggcccgctttaaacagcttgccgtccgtgttttcgatattgacgagacaggcaaatcagatgaagagatcgcacttgaaggaatcagcaggctgtctgaattctggacgagcctcggcgctccgaacagactcgctgattacgatatttctgatgagaagctggatacgattgcagataaagcgatggcaaacggagcattcggacagttcaagtcactgcagaaagaagatgtgcttgcgatactgaaagcatcattgtaataacataaaggggggcggccggattggcagctcctttttttctgtgttatagtaattcccttacgatttttttggaggtcatgataaatggagaactttacgtactgcaatccgacgaaactgattttcggaaaaggtcaaatcgaccaattgaaaaaagagctgaagcaatacgggaaaaacgtgctgcttgtttacggaggcggcagcattaagcgaaacggcctgtatgaccaagtaacaggcattttaaaagaagaaggcgcagccgttcatgaacttgcgggcgttgaaccgaacccgcgtctggaaacggtaaataaaggaattgagctgtgcagacagcatgagattgatttccttctcgcagtcggcggcggaagtgtcatcgactgtacaaaagcgattgcggccggtgcgaaatatgacggcgacgcatgggacatttacagcaaaaaagtaacggcgcaggacgcgctcccgttcggcacggtgctgacgcttgcggcgacaggctctgaaatgaaccctgattccgttatcacaaattgggaaacaaacgaaaaattcgtatggggcagcaatgtcactcatccgcgtttctccattttagatcccgagaatactttcagcgttccggaaaaccaaaccgtatacggcatggtggatatgatgagccacgtatttgaacaatacttccacaatgttgaaaacacgccgcttcaggacagaatgtgttttgcggtccttcagacggtaattgaaacagcgccgaaacttttggaagaccttgagaactataagcaccgcgaaacgattttatacgcgggtacgatcgcattaaacggcacgctgcaaatgggctatttcggcgattgggcttcccatacgatggagcacgccgtatcagcggtttatgacatccctcacgcgggaggacttgcgattctgttcccgaactggatgagatacacgcttgatacaaatgtggaccgttttaaaaacctcatgcttaatatgtttgacattgatactgaaggcaaaacggataaagaaattgcgcttgaagggatcgataaattgtccgcgttctggacaagcctcggcgcaccgtcccgccttgcggattatgacatcggcgaagacaagcttgagctgatcgcagacatcgccgcaaaagaaatggaatacggcggattcggcaatttccaaaaactgaacaaagatgatgtacttgccatcttaaaggcgtcactgtaagatacattcccggccggagtgattttcaagctgcagatgtaaccgttttgggagtccctctttccggattttctattagttcattaggagcaagtgaaacacccttttccatgagacaactatggaaatcgtttcatccgtaaaggaccaattaactttgcgattgtctgtcatctatttacacgaaatctaaatcacgaagatgaagagccgcgaatttaaaaaaggggcgctgattcaatcagcgctcctttttatgcattttgtgtactaaggtcccgctgcgcccccatatagcttcccattaagttttgataaccgggaagatgactggagactaatgcgccaaaaccttcaacatcgttgcgccaatcacgctgaagctcgcatgctgtgctgaaccagttcataagctgcacgccgccatgagccatacgggttaatgatgcatctgctacttgcttattaaacgtccccgaagcatctgtcacaacaaacacttcgtagcctgctttaatggcagaaagcgcaggaaaagcaacgcagacgtctgttaccacccccgcgataatcagctgttttttgccggtcgcttcaatggctttaacaaagtcttcattgtcccatgcattaatttgtccgggacgggctatttttggcgcatcaggaaagagatcaacgagttcttgcatgagcggtccgttgggtccattttcaaagctggttgttaaaataaccggtaaatcaaagaatttagccgtatcaccgagagccaatacattgtttttaaattcatcaacgccatagtcacgcacgagaccggaaataaggccggtttgatggtcaactaaaagcacggcagaatcatcttttgaaagacgggaataaagatcagacattttatcatcctccttgaattaaggcaagtcagtttgtcaatggaaaacggtaaatctattcatatactgtataggtagaaagttatttctgaagtgacttttcgtgaaggtgatgatctttcaattaatccggaatgggaaccggagcatgatcaatccaatggatgaactgttgtaaatagcgttgaagataacgttttgtttgttcatccgtaagtatgtgttgagcggaatcaattttctcatggacttgcgaaatcagcattttttgaaagggcagaacattgacttgcatagcttcgagtacttctctcgtttgcatttgaccaaaagaggtgccgaaccctccgggggttgcgccgattaagccaaccggttttctgtttaaaacggaagaggtccgcggtcacgatgcccagtccaatgcattttttaatacccccgggattccggaattgtactctggacttacaatgatgacgccgtcaacgtctcgtatatcagctctaaaggatgttacggagtctggtgctccggccatttctaaatcttcgttaaaaaaaggaagagtgtctatttcaacccagcgaaattgagccgcattatcgaagtcaatcaatgattgagcaatcactcgattatacgagttttttcgtaaacttccacaaataagaccaatggttttagtcaaagaatcacctcccggtttaaaattattttcatcttaacatgataacccaaatatagacactatttttaaaaatggacatttataccttaatatgcctgcttagcagcctctcaagaggagtactatataaaaagaaccgtcccatcggtattggcgatggatgtcaacctgctccaaagtaaaggtgatacgttcctggatcaccaacattcgattcgttacctctttcacgattattacaaatataactatttcgaatccgggatattgtataaaaaatgagcgcatcttcagcgcaaatcccgtattcatcatgccttcttcatgacttgatttagcgggtgagttcatataaagtgaaagagaaaacaattcaccgtgatggagggacaagcaaatgacgcatgtacgctttgattactcaagagcgttaccttttttcaatgaacatgaacttacatacgcacgtgatttcgtaaaaacggcacaccataatatccatgaaaaaacaggcgccggaagcgactttttaggctgggtggacctccctgaaaactatgataaagaagaattcgcgcgcattaaaaaaagcgctgaaaaaatcaaatcagattctgacgtgcttctcgtcgtgggtatcggcggttcatacttaggcgcccgcgcggcgattgaagcgctcaatcattctttctataatgttctgccgaaagataagcgcaaaaaccctcaagttatctttatcggcaataatatcagctcaacttatatgaaagatgttatggatcttttggaagacgctgatttctctatcaatgtcatttctaagtcaggcacgacgacggaacctgcaatcgctttccggattttccgcaaacttcttgaagaaaaatacggaaaagaagaagcgaaagcgcggatttacgcgacaacagataaagaacgcggcgctttaaaaacgctttctaatgaagaaggcttcgaatcattcgttattcctgatgatgtcggcggacgtttctccgttctgactgcggtaggccttctgccgattgcggtaagcggggctgatatcgatgaaatgatgaaaggcgctcttgatgcaagcaaagacttttccagctcggaattagaagagaacgcggcttaccaatacgccgtcgtccgcaacgttctgtataataaaggcagaaccattgaaatgctcatcaactatgagcctgcgctgcaatactttgctgaatggtggaagcagctcttcggcgaaagtgaaggaaaagacgaaaaaggcatctatccttcttccgctaacttctcaacagaccttcactctctcggtcaatacgtgcaggaaggcagacgtgatctgtttgaaaccgtattaaacgttgaaaaaccgaagcatgagctgacaattgaagaagcggaaaatgatctcgacggcttaaattatttagccggcaaaacggtcgatttcgtcaacaaaaaagcgttcgaaggcacgatgcttgcccatacagacggaaaagtgcctaacttaattgtcaatattccggagcttaacgcatatacatttggatatctcgtttatttctttgaaaaagcggtggcgatgagcggttatctgctcggagtcaacccgtttgatcagccgggtgttgaagcctataaggtgaatatgttcgcgcttctcggcaaaccgggctttgaagagaaaaaagcagagcttgaaaaacgccttgaaaaataaaaagaagggctggccctcagcatgacgggtcagccttttttaaaccgtgaaaggtgtgatgatgaattgatgcggcttttatgtaagcatgtcttcatttccgtctgttccgccgctatcgtctattcggcactaaaactgtctcccgaatccctcttgcaaaccatcctgtttttcgctttccctctcggcttgtttacggacatggtccggctgaaactgaagattggccggatgcatacgctgatcacgaagtgctgtctctatgccgccgttttctatatttcaacggaagccgctctctccgcaattgtgacgtatgttctgattgaatgcgccgtcacctcttttcagcgtctgtctgccgctcccggttcttcccggacgccgtatgaagataccgcagagcggggacgctaaagacaaaaaggagcatatgcacatgatcagcataccatcttcacttgaaggtcaatcgtttttactccgcgaactggaacaggtgatgaaaccgatcggttataccatcggaggcggctgggagtatgaccgcgggttctttgattacaaaatttccgatcaggacggctatttatttctccgtatccctgttgaagcaaataagggacacctggatgaacggggggccgccgttacaatcggcacaccctttttgctgaggcacgtttatcagcaggaaacggatgatgcagcaggcggcggtgtttttgagtcattattcaaccaattctccgaaccgaaacggcgggatgcggcaattgaccgctcatatacagatatcggcatctcgcttgtgaaagagctggaagacgtcctgctgcattaaagagccaaaaacagatcagtatcgagcacctggtatgacaggggaggggtcagcatcggcccctcttctttttgtatgccgatgatcgtggtattccgtctgagataatagagcgcgcagtcatgataagatgagccctttagttcctcggggacgggaatgatgcgcacctttttctccagcgtcagatctgacagcgtttgcggtttggcaagctgcagcttgacccggtaatgctcaaacatcacccggctcgacaggtgtgatgtgcacagaatcttattggctcctgcgcgctcggcgtttttgacataccgttccgttaaaatttctacgatacaataaacagacggatgcagccctttgatggcgagaagcgttaataccgacagcatatcagcttcggattcatttttctgctggtccgctgtcagaatgacggtatcagcttccgtaatattcgccttattgagcgtgctgtcatcagcggcatgtccgcggatgaaatggacgttttcaataagcggaccttcccttaatgaatcatcaatcaggacgacagtttttgacggtgcgatgtgctgcagctctttcagcagcatatgcgatttttcgttccatccgataagaatgacgtgccccttgcctttaaaggcgaccttcccttcgacatagcggtgctgtttgctgaacacggctgaagaaagcgtggcgaaataggcggtcacaaaactcgctccgcttaatacaagcaccatgccggcaatctgcccgagcggcgtctgcggaacgtaatcgccgtagccgactgtggccaccgtaatgaccgcccaccaaaccccttcaaacacagacgtgaattgcttcggttcgagcatgtaaatgagttggccgaacaataaaatcaaggcgataatgatcagcccgatccgaacatataacggccatctcagccaggaaataaaaatacggtttgatttcattcgtccggctcttctttcgacagagagatggataaaatctgcttaataatggtgtttagtttttcgtccagctgttcctggccgtatgagtcacgcgcatgtctgattaaatcggccgtctcatcttcaaactgaatgagaggttcgtcgttttctgattcattatagagctggatgaaggcgtcaagcccttcgttcattctgtctatcgcattgctcagctgttctttctcgccatttgtcactttcatgtcgatcacacctgtatctttttttatacagtatgtcccagttcgtttgatgtctttcaaaaatcgccgaaaacatattcacccttattttttcatatgataaagaaagcggaccgaaaaagggtgagtcaaatgacggtcattcaaaaactgttggcggcgctggccggagcgcagctgcttgcttcggcggccgtattgcttattttcgatttgaatggatacaatcacatgtccggcggattttcatggcttgtttttgcaaaagagaccgcaggcacgtttccgttttacatcggaatggccgggtgtatcctcatcatgctcggaggattgattcctgtcagaaaaaagaagcggatttctgtacaggaaagcgggcaatcattaaaataatatataagcagatcgtacgatataagagaaaaaggaagaggataatatgctgtttatctttttaacaattgctgcattgggtttgtcgttttgggcacaatttaaagtgaaaagcaattttcagaaatactcagacgtggaagcctccagtcagcggacgggggcggaaacggcaagacggattcttgatattaacggtttatatgatgtgccggtagaaccggtaagaggcactttaacagaccattacgacccgacggagcgggtggtgcgtttatctgagccggtatattacggccgctccatttccgccatttccgtcgcttcccatgaagtcggacatgctttgcagcatcaggaatcatacggcgcgcttgtgctgaggcacaaaatttttccggtcgtcaattttgcctccggggtcgcccctctgcttttcttgggcgggatgctcctgggcagcttgaacttaatcggactcggcattattttgttttcggccgctgtttttttccagcttgtcacactgcctgtcgagtttaatgccagcgcgagggcgaagcggattatcgtgtcggaaggattcattcgcaacagtgaagaacacggcgtgaataaagtgctgaacgccgccgcgctgacgtatgtggctgcggcgctcgtttcattattcgagctgcttcgttttgtgatgattttcttaaatggtcgtgatgagaattaacacgaaggaggtggccccttaccgtttgcggtaggggtttttttgcttatattaaaactgattctcattatgctgttaatcggattaacggccatctttgtcgctgcggaatttgcgattgtcaaaatccgcggttcaaaaatcgcggagctggttgaaaccggagacagccgggcgctcgcggcgcacagggtgatttcaaatctcgatgaatatttatcagcgtgccagctcggcattacgattacggcgctcggactcggctggctcggtgaaccgacgattcagcggcttcttcatcctgttttcagcctgatcggaatgccgtcatctattacgcacgtcgtcacgtttattgcggcgtttatcgccgtcacgtatctgcacgtcgtcatcggagagcttgcgccgaaaacgatatccattcaaaaagccgaagctgtcagtctgtggacggcgaaaccgctcattctgttttataaagtgatgtatccgtttattaagctgttaaacggctcagccggatttttggtcaagctgttcggttttcattcggtgaaagaacatgaggtcgtggtcagtgaagaagaattgcggctgattttgtccgaaagctataaaaaaggtcaaatcaatcaatctgaattccgttacgtcaataaaatatttgaattcgataaccgggtcgccagagaaatcatggtgccgcgcaccgaaatcgccgtcatctcgcttgaacagtcagttgatgaagccatacatttgatcatcaacgaacggtatacgcgatatccggttattaaggaagacaaagatcacattctcggcattattaacaataaggatttatttaaagcgtattttctcggccgctccattgaattaaaagaaatgatgcgtccggtcatcagagtcattgaaagcatccccgttcaggagcttttgatccgcatgcagaaggagcggattcatatggcgattctcgttgacgaatacggcggcacggcgggacttgtgaccgtcgaagacatattggaggaaatcgtcggggaaatccgtgatgaatatgaccaggatgaaatgccccacatcgtcaaaaaaggcgaacaccattatgtgatggacggcaaggcgctcatagaagaggtgaatgatctccttgatatcgccatcgaaaatgaagacattgacacgattgccggctggctcttaacacaaaaaatggagctgaaaaatggtgatgtgtttcatgccgaagggtgtgaatttaaggtgctggaagcggaagaccatcatatccgcttcgttgagattaaaaaaactgatttctgagcctcctgcttttgcaatgaggctttttttatggaaaaaatgcttcttcgtcccgctccttcatatgctgtaaagaaaggagtgtcggtatgaaaacggattggtggaaaacggcggccgtctatcaaatttatccccgaagctttatggattcgaacggggacggaatcggcgatattaacggcatcagagcaaagcttcattacataaaagagttgggggcggatgtgatctggctttgtcccgtttttgactcgccgggcgcggacaacggctacgatattcggaattataaacaaattgccggcgaattcgggacgatgaaggattttgaccggctccttgcggatgtccatgcgctcggcatgaagctgattatagacctcgtcattaaccatacaagcgatgagcacccttggtttatcgaatcacgctcagcgaaagattccgaaaaacgggactggtacatctggagagacggaaaaaacggcaaagagccgaataattgggaaagcattttcggcggatcggcgtgggaatatgatcaagagaccggccagtattacctgcacctgtttgacaaaaaacagcctgatttaaattgggaaaacgaagcgatgaggcagtccgtttatgagatggttcgctggtggcttgataaaggcatagacggcttccgggtggatgccatttctcacattaagaaaaaagaagggctccctgacatgccgaacccggacggtctcccgtacgtcccgtctttcccgtatcatatgaatggggaaggcataatggatctcttaaaagagctgaagcgggaaacattttcgcgctatccgatcatgacggtcggcgaggcgaacggagtggcggcttgggaggcggctgattgggccggtgaagaaaacggcgtctttcaaatgatttttcaatttgaacatctcggcctctgggatacggaagatgatcaaagcatctccattccggcgcttaagcgcgtcttgtccggctggcagtacagccttgaaggaaagggctggaatgcgttatttatggaaaatcacgaccagccccgttccgtttcggtatggggtgacgaacggtttttgacagaaagcgccaaggcactcgccgtgatgtatatgctgatgaaaggcacgccgtttatttaccagggacaggagctcggcatgaccaatgtttcgttcccatccattgaagattatgatgacgccgcaattaaatatctgtatgaaaaagagacgtcccgcggcgttccgcatgaacaagtgatgaagatcatctggaagaagggccgggataattcacggacaccgatgcaatggagcggtgaggcgaacggcgggttttctgatgcttctccgtggctcggagtgaatccgaaccacacatggctgaacgctgcatcacaattgcaggatgaaacatccgtataccatttctacaaacggctgctcgccctcagaaaaaaacacggcgtattgatcagcggcacatatgaattgctgcttccgaatgaccggcagatttatgcctatctaagaaaaaacggaacaaaaaccgccctgatcatcaccaatctgtcccgaacccccgctttatacaggcatcccggttatccgcttgactccgattctctcgtgcttgcaaacgtggaaacagaatcgcaccgccatgtgacatccttcctcttaaagccttatgaggcccgcgtatatatatggtgaaaaacttcagtcccgaggctgaagttttttgtgatctgtgtttatcatcgcgatccgacaggaaaagacaaatacagaaacgaatatgggaaaggaagagaaaaagaaaggaggcattcatatgctgaaaaaattgcagattcaaacaaacaaaagggatgaaatgatcgacatcacacatgaagccgaatcgtttctccgcgaaacaggcgtaagaaacggtttggcgctcatatactgtccccataccaccgccggcattaccatcaatgaaaatgccgacccggatgtgaagagggatatgctcagaaggtttgatgaaatgtatccgtgggagcacgaactggaccggcatatggagggaaatacggcggcacatatgaaagcgagtacaaccggcgcctctcagcatgtcatcatagaagacgggcgcctgatactcggaacatggcagggcgtttatttttgcgaatttgacggtccgcgaaacagaacatgttatatcaaaatactggctgaaacggaggaaaacaaatgagtgagtggatgagtccgttatcattaacaaagcccgtcattcaggccccgatggccggcggactggtcacgccgcgtctggcttcggcggtatcaaatgaaggggcgctcggaagcctcgcttcaggatacgtcagcccgcaagcgcttgaaaaacagcttatcgagatgaaagagctgacggaccgctcctttcaagtaaatcttttcgtcccggaagaaagacagatgcctgaggcggaacttgttgaaaaatggaaagcccgcattccgagggcaaaagacgccaagccgttctctgatctgaaagaagaatggaatgatttcgcggaaaaagcggagcttctgatccgttacggagtcaaagcgtgttcattcaccttcggcctgccgccggaaaaaacggcggaaaagctgaagaaaagcggttgtttccttttcggcacggcgacaacgccggaggaagcgaaggcttttgaagaacggggaatggacgccgttatccttcagggaatagaagccggcgggcatcgcgggtcgtttctgccggttaaaggagaaccggctctcggccttatggcgctgattccgcaggctaaagacacgctgaatatcccggtgattgcggcaggcggcatttttgaccgccgcggggtgcaggcggcccgatgtttgggtgcggacggcgttcaagtaggaacaccgtttctcctttgtgaagaaagcagcgcctcaccggcatatcaaaaagccattgccgaatcaaaaggagccgatacgcggctgaccaccctgttttcaggaaaacaggcgcggggaatcgtgaatcagttcatgaaaacatatgaagctgacgagggaaaaacgctgccttatccgctgcataatacgctgacaaagccgatgcgcgggcacgcggctcaatcaggagacgcggagcatatgtctttatgggccggccagtccgccgcgaaacttgaggggccgacagacgtgaaaaccgttttggacagattgtgcgaatcataatccagaaatcgtgaggtgatggatgatgaagattcttcaaatgtcctataaaaaaagagggactattgagtttgtctttgaagattttccgcattccaaagtcaccatggcgccgattaaagggtattactttgtccgcgccattaaatggagcagacgggacagagccgtcacccgccatgatttagagaagtttgaatgggctgcaaaccaagcgctcggcacgacggctttttaccggaaaagaaaagcatttcacatcccatcgtcacaatgacagacgatgggattgttttaatgcatgatctgataaagcgcgggtgcatcaagccttgttgcctggttaagcagataagccggctgcacggcatttttttttcttaaagaattcaatctctggatgatttgttcagcggtcagaatcccgagaccgtgggcgaaatattgatcattccccatcacaatgacattttctccccgccactgagcctttgcagggttaaaatcaggatttttaaaatataaacagtctccccgtaaaaagtggctgccggtttccgtgtagatcggcagatgctcatagtgccagtcatacaaagtgatatcccggaaacgccggttaaaccgttcttcaccgattgtctttaagacggccagataataaatcacaacaatggcggtagcgcattcaaatgcgtaaaacgccccgttttcaataatatcccgaatcgcttttgaagcgggaatcctgtacttcagctccagggctccttccggcgtcagtctccaataagccgtatttccgtatgttttggcgaaagttgcaaatttcacacctgatccgtgcagttctcttgcggcttccacaatatggcggcgcagccgcacctcgaacatcagttcagcaatcgacccgtaatcgaattgtacgggagaattgagcagttcatttatatacggaacaaggctttcttccgtctgccagttcgcgatgtcctgaggccgaagcacttggccggatatgataatcatctgcgcgccccctatctttttttataagatatgcaggaagcttgggcaatgaaaatcaagtgataaaaaaggaggaaatgttaacaaaatgtgaagactgagccgatatataaggtatcacacttgagggagcagcttaatatgaaaaaattcattaattggtgcacaaaggcatcgatttcacggaaattaatcatttcatttatcgtgatcttaatcataccgattctcgtgttagaattcagttcataccatacggcgagcaattcgctggatgatcagatttcaggcaacgcgaaaaataacatcgaatcttttaacacaacgattacaaatgatatcggcgcaaaagcaaaggcgattgaatttttcagtgaaacgttaaaaggatcatccttctcaaagaaaaacatgtctgctcttgaagaaaagttcgggcaatacacgtctattcataaggacgtagcccgcatttacggaggaacggaagacggcagctacgcacaggcgccgaaggaaaatactccggccgattacgatccgagaacacgcacttggtataaagacgctgtgaaggccggcggcacgctcgttgtcaccgacccttacaccgcggcaagcgacggcagcatggtcattaccgtggcaaagcagatgcaggacggaacaggcgtagtggccatggatattacgattgaccagctgctgaagcagatgcagggaatcaaaatcgggcaaaaaggattcgtgtttatcacgtccaaaaataaaacctatgtcgcgcataaagaccacaaaccgggcgataaagtttcaacgccgtggctgaatgaggtatacagcaaagacagcggcattatttcatacaagctcgatgatcaaaataaaaaaatggcgtttacgacaaataaactgaccgggtggaaaatagaggggagcatggagctcaacgaaattaaagatgcctcacaaccggtgctgacgatggggatgattgtccttgcagcatctattatcatcgggggaattttaattctgttgattgtcagatccattacgtcaccgctgaaacggcttgtccgctcttctaaacaaatcagcggcggagacttgactgaaaccattgacatccgctcgaaagatgaattgggcgaactcggcgcgagctttaatgaaatgggagaatctttgcgcggactgatcagcgcgatccaaaactctgtcgataacgtggccgcgtcatcggaagagctgaccgcttcagcttctcagacaagcaaagcgacggaacatattacaatggcgattgagcagttttcaaacgggaacgaagagcaaagcgaaaaagtcgattcaagctcagccaagctgaatcatataaatgacggactcgccgccgtttcccgcacatcatcatccattacggaggcatctaaacaatcgaaggaagctgccggcaccggggaagaatatgtgcagcaaaccgtcgggcagatgaatctcatcaatcaatcggtccagcaggcggaagcggttgtaaaaggccttgaggccaaatcaaaagacattactcatattttaagagtcatcaacggtattgccgatcagacaaacctgcttgcattaaatgcagccattgaagcggcaagagccggtgaatacgggcggggcttctcagtagtagccgaagaagtgagaaagcttgccgtccaatccgccggttctgccaaagagattgaaaaactcattcaggaaatcacggctgaaattaatacttcgcttcacatgtttacatccgttaatgaagaagtgcaatcaggacttgccgtaacggatcgcacgaaagaaagcttccagaatatcttcggcatgacgaacgacatcgccgaaaaactgcaatcaatgaacggcacggttgaacagctgtcagacagctctcagcacgtttcagccgcagtgaccgatattgcggacgtatcacgggaaagcgcagcaagcattcaggatattgccgcatccgcagaagaacagcttgcatcaatggaagaaatcagcacatccgccgatactttggcgcaaatggccgaagaactgcgggaattaacgaaacaatttaaaatcaactagtaaaaaaggacgctttccaggtggaaggcgtccttttttatagtgacagccggataattaaataaaaagtcttgcatacaaagggagtacatagaactatttttcatttatgacttaattttcaatgtaataaaaagggagtcggccgatataaacagtaaatgattgaaagaggtttacaaaattgaaaaaaacagcaaaaaaaatcgccagaaaatcaatagccaaaaaacttatcatttcatttttactgatcttaattattccggtagcagtattggccgccggcgcctaccgttcggcggcttcatccgttgaaaagcaaatgatggaaagcgccgaaggaaatgtgcaaatcttaaacaatatgattgatgaccggatcggaatgtttacaaaaagctctgcatatttcagcgaatgggcgacaagcgctaaatttaaagaaaaaaaccaaacggaaatgcaagaaaggtttaaacagtttattgaaagcaatgataaagcgtccgccatattttcaagcagcaaggaaggaacgtttacccgttatccgcatgccgatatgccggccgatttcaatccgcttgaaagaagctggtatcaggaagccatggagaataaaggccaaaccatcatcacggacccttatgagtccatctcaaacaaaaagatggtcgtcaccatggcccgcgcggcgcaagacggatcaggcgtcgtcgccattgatataaaaatcgacgatctcatcacgatgacaaaagaagtgaacatcggaaaagaaggatacgcctttatcctcagcaaaaataaaaaagccgttgcctacagtgatgaaaaagccggcgcggcggtatcgggaaaatgggttgatacattatacagcgggcaaaaaggcgactatgaatatacgctgaacgggaaagcgaaaaaaatggcgtacgtgaccaatgaagcgacgggctggaagatcagcggaaccatgtccgtggatgaaatcaaggatgcggcaagaccggttctgactctggccgttatcatattggcgatagccgttgccgcagggatgattttcatttattttgtcatccgctcaattaccaaaccgttaaaacgtctcgtagcttcagcggaaaaaatcagcagcggagatctgactgaaaccattgatgtcagctctcaagatgagctcggcgtgctcggtaaaagttttaatcatatgacagattcactccgttcgcttattcagggaattcaggactctgttgaacatgtcgcttcttcctcagaggagctgacggcttcggctgagcagacgagcaaagcaacggaacatatcacccttgcgattgaacagttttctaatggaacggaagaccaaagtgagagtattgataaagcgacagcacaagtgaatgagatgaaagacgggctcagcgatctggcggaagcggcagccgttgtgacggaaacttcaattgaatcggcggagatatccggcgccggtgagcggcttgtcaagaaaacagccggccagatgggcgccattgaccaatccgtaagtaaagcggagcaagtcgtacaagggcttgaactcaaatcgcaggacatcaccagcattttgcgcgtcattaacggcattgccgatcaaacgaatctccttgctttaaatgcagccattgaagcggcaagagcgggagaatacggacgcggtttttcagttgttgccgaagaagtgagaaagcttgccgtccaatccgccgattcagcgaaagaaatcgaatccttaattcatgaaatcgtcaaagaaattcatacttcgctcggaatgctggaatccgtcaatcacgaggtgaaaagcggacttcagttaacggacgaaacggaaaaaagcttccgggacatttccgctaaaacaagtcagattgccggtgaactgcaaaatatgaatgcaaccgtggaacagctttctgccggatctcaggaagtatcaaacgcttcagaggatatcgcggcagtctccagacaaagcgcggccggcattcaggacatcgcggcttcagctgaagagcagcttgcgtccatggaggagatcagttcctcagccgtcacgctggaaaaaatggcggaagaattacgcgaactgacaaagcgttttaagataaactcttaattaagtctaaaagactaattttgcaataggtaaaaagtatgtttcgttatatttcttctttttggatgtgtatatttacccataattgccgatatgaagggtaaacacgcaagaggagatatagcagatgaaaaaaattgtgcaaatcatcaagcagagatcgcttacaagaaaactgctcatttcttttttggccattctcattcttcctatttcaacgctggcttttatcgcctatcaatcggcggtaagtacgcttgacaggcagatgatgggaagcgcattagataatgtgcagcagattaacgatatgatcaacacaagcatcagccaaaaggaagacggaacggcatatttcagcgactggctcacaaaggatcggtacaagccgaaaaaccaatcgcaaattaccgataaattcacagagtacatgaagattaataaagacgtggaatccatctatacgagtgacacggaaggacatttcacacggtatccggatctgcagatgcctaaaggatataatccgcttgaaagagactggtataaaaaggccgtggaaaataaggggaaagttgttgtaacagatccttaccgcacggcttccaccaatacgatggtcgtgacggtcgttcagcagacgaaagacggctcaggggtcgtcgccatcaatatgaaaatcgatgagcttctgaaaacgacaaagaaagtgaacatcggaaaatcaggctacgcttttatcctgacgaaagacaaaaaagtggtcgcccacccgaaccgtgcgtcaggcacagtattaaacggggagtgggctgaacagttgttcaccagcaaaaaaggtgattttcaatacaaatacgacggccaggaaaagaaaatggcttatgatacgaacgggctgacaggctggaagattaccggaacgatgtatctggacgaaattcatgaagcggccctgccgatccttcatctgtccctgctcgttctcgtattagcgattgtcatcggaaccatcgtcatggtgctgattatccgttcaatcacaaaaccgctcaagcagcttgtgacatcatcgaaacagatcagtgaaggcgacttaacagaaacgatcgaaattcagtcaaaagatgaattaggcgagctgggcaaaagctttaacaatatggccgcttcactcaggtctctcatccatgccattcaggattccgtgaataacgtcgcatcttcctcagaagagctgacggcttcagcggagcagacaagcaaggcaacggaacatatcacactggcgatcgaacaattttctaacggaaatgaaagccaaagtgaaaatatcgaaagcgcggcggaacatatttatcaaatgaacagcgggcttaaagatatggcgaaagcatctgccgtcattaccgaatcctccgccacatcagcggaagtcgccaattcaggcggaaagctcgtccaccagacggtcggccaaatgaacgtcattgaccggtcagtgaaagaagctgaacaagtggtgcgcggacttgaaacaaaatcaaaagacattacaaacattctcggtgtcattaacggaatcgctgatcagacaaaccttcttgcgctgaacgcggcaattgaagccgcgcgtgcgggtgaatacggccggggcttctcagtcgtcgccgaagaggtcagaaaacttgcggtccagtctgccgattcagcgaaagaaatcgaaagcttaattatagaaatcgtcaacgaaatcaatacatctctcggcatgttccaatccgtcaacaaagaggtggagagcggactggatattacgaatcagaccgaaacgagcttcaaacggatttctgaaatgacgaaccagatcgccggagaaattcaaaatatgaatgcgacggtagaacagctgacagcaggatcacagcagatttcaggagcttctgagcaaatcgcgtccatcgcaaaagaaagctccgccagcattcaggatatcgcggcctctgccgaagaacagctggcttcaatggaagaaatcagttcgtcttcggaaacgttatcccaaatggcggaagaattacgtgatatgacgaaacgatttaaaatagattaatagatcatagaacacccaaatgtgctgtttgggtgttttttttagtttttttaataaatcttttgtcctatctgacgatattagatttagcttttcaaagaaggagactgaaaaaatgaaacaactgatacattggatcaaacagccatccatcagcaagccgctgatcgcggcatttttagccgtattggtgcttccggtcggcatactcgcctacttcagctaccaaacggcggggagtacattagaaagcgaactgacccacagcgcccagggaaatgtcagtgaactgaacagcgtgctggaaaacatgcttgagggtaagctgaaagcgattgactactacagcgaatcaatcacaaaggaaaaactgaacacgaaaaataaatcggtactgctcgacaatatgaagcagtatgtcaccgtaaatggcgatgtcgcgtcaatttacgccgcgtctcgcgacaaagcgtttgtgaaatatccgtccgctgacatgccgtccgattataatccgctcacgcgcgagtggtatacaaaggcggttgaaaaaagcggacagccggtgtttaccgagccttataaagacgctgcaaccggacagacggtcgttacgattgcccagcagacaaaagacggatcaggcgttgtggcgcttgatattaatctgggcgacctgctgaacgcttccgaacgcgtccagatcggtcataaaggatttgccttcattacaacgggggataaaaaatacatcgcccatccgactataaaagcgggaacggaaggctccggagagtggacgaaagaagtattttccaaatcaagcggatcgtttgaatacatgtttgaaggacagcagaagaaaatggctttcacgacaaacaaactgacgggctggaaaatcgccggcacattttttgtcagtgagatccatgacgcagcctcgcctgtcatgaaaatggcgctgatcatcctggcggtttctcttatcgtcggcggtattttaatcttctttatcattcgctcgattgcaaaaccgctcaaaaaacttgtctcgacatcagataaaatcagtgacggcgatttaacggaagtcattgacatcaagtcaaaaaatgaattcgggcagctcagccaaagcttcaatgagatgtcggcatcactccggtctgtcatcggcgtcatccaatcatccgtcgaacatgtcgcttcttcatccgaagagctgacggcatccgccggacagacaagcaaggcgacagagcatattactctggcgattgaacaattctcaaacggaaacgaatcacaaagcgagaaattggaagaaagtgctgatcacctttcccaaatgaatgcgggcattgccgagacggcgaatgtatcggcggaaatcactgaatccgccatccaaacctctgaaacggccggaagcggagaagaattagtggcgaaaacggtcggccagatgaaaacaattgatcgttccgtacagcaggcggaagccgtcgtaaaagggctggaaacgaagtcgcacgacattaagagcattctgaacgttattaacggcattgccgatcaaacaaatctgcttgccttaaacgcggccattgaagcggcaagagcaggcgaatacgggcggggcttctccgtcgttgcggaagaagtgaggaagcttgccgtacaatcagccggctccgcaaaggaaatcgaaacgctgattcaggaaatcgtcaaagaaatcgccacatcgctttccgtattccaagcggtgaatcaagatgtgaaggaaggcctcgatattacggatcaaacggccgaaagcttcaaaaaaatctcagagatgacgactcagatttcaggcgccttgcagcatatgaacggaacgcttgagcagcttgcagccgggtcgcaaaatgtgacaaacgcggtggaggacattacctcagtcgccaaagaagggtccgccggcattcaagacatcgccgcctcagctgaagagcagctggcctccatggaagaaatcagttcatccgccgaaacgcttgcgcatatggctgaagaactgcaacaggtcacacggaaatttacgattcagtctgaagacgaagaacagctgtaacgagctgtttcttttcctcatctgaaaaaagcgatacactaatataaaagaagggagtggcagtgatgagattagaaggcaaaaaagttatagcgcttgtcagtgacgattttgaagacttagagctttggtatcccgtctatcggctgagagaggaaggcgcgatcgttcatttaataggagaagaagcgggccgttcatacaaaggaaaatacggcgtgcccgcgacggcggattacgattttaagagcctgattattcaggagtatgatgccgtgctcgtgcctggcggctgggctcctgacaaactgcgaagatatcccgaagttttggacatcatccgtacgatgaacgagcagaaaaagccgatcggccagatctgccatgcgggctgggtgcttatatctgccggaattctcgcaggaaaaaaagtaacgagcacgcccggcatcaaagacgacatgacaaatgcaggggcaaagtggctggatgaagctgtcgtaactgacggccacattgtatcaagccgccgcccgcccgaccttccgcagtatgcaaaagcgtttgctgacctgttagcgtccaaataaaaaacatccgcccgaatccgggcggatgtttttagttttgatcggcgggaaagacgattccgatttgttttctcgcttcttccataatgtttgccgtaatgaaagaacgttcaaatgtattttcggaagactcccgctgtccgtttcgaagaagattgatgaattcagccgtttcgtagtacatcgaaggtttcagatcagggactgaaatgtcttccgtccggccgtcacgatagcggatttccgcccgttccggtccgtgaatgctgtccagaacgatcgtgccttcttcaccctgaatttccgccggggcaaacgaatttgagattttcgaatgcatcagcaccgcttcaaatccgtcgtatgacagaatgaccgtgccttcgccgtcaacgccggatgctagtttatgaccggtcgcaatgacgtttttcggtttgccgaacaggacgacggccggataaatgcagtacacgccgatgtccattaacgaaccgttcgataattcaggcttaaacgcgttaagcaccgtaccgtttttatatgcatcatatcgtgatgaatattggcagtagcttgccgtgaatctcctgacgggtccgattttatgtaagtggttttgaagcatgctgaagttcggcaggaacgtcgttttcatggcttccatcaagagaacgccgttcgttttggctgcgtgaatcatttcatccgtttcccttgcgttagacgcaaacggtttttcgcatagtacatgcttgccgtgttccataaaaaggaccgcctgctctttgtgaaatgcattcgggctggcgagatacaccgcgtcataggctttgctttccgccatttctttcaggctggtgaaataatgagcagcgccgtgtttgccggcgaattccgccgcacgttcctcagttctggaataaaccgccgttaattgaaaatcatcaatagcagaagccgcctccagaaatcgttctgtaatccaattcgttccgactgttgcaaatcgaatcattgctatcgctccttctatgtattggcttacattatagctttttttcaaagaaacataaatggaaaaaaggctgccagctaaacggataggaaaaattcccatagagaccggttattatttttcattacaggaacgatagtgtacaatttaagtaaaatacatatgatggaggaacaatagtggaaacattgcaaacatggggcggcagatttaaacagtttttcttagacaataaatttgtcttgtttttgcttgtattgctgctcatcggtctcaatatccttgtctttatgaagacatcatttattttcacacccattatcgtcctgctcaaaacgattgcgctccccgtcattttgacaggaattgtttattatctgcttaatccgatcgtagatatattggaaaaaataagagtgaaaagagtctattccatcctgctcctttacctcattattatagggctgatttcgattacggtcgtttcaattattccgtttttaaaggaacagatcatgagcctgatcgacaacctgccgaaatatgtggacatcgttgaagatcagacgaaaagcctgatcggaagcgattttgtaaatcaggcgcaaaagacgatgaatatcaacatttcggatcttgccaataaagtatcggcgcaggcggcgacaattgcaaacagcacatttaccggagtcgggaattttatcggcgcgctgactgaagtgattatttcaattgtgaccgtgccgtttattctgttctatttgctgaaagacggcaaaaaactgccgatctatatcttaaagtttgtgcccacccgtctgaaagaacaaacgtatacgatgctgagtgaaatgaaccacagattaagctcctatatcagaggacaggtcatcgtcagcttctgcatcgggtttttattatttatcggctatctgattatcggacttgattatgcgtcactgcttgcggtcattgccgcttgtacgagcgttgttccgtatttagggccgaccattgctatcacgccggcgattattatcgcgttggtcacttcgccctttatgctgctgaagcttgcgattgtctggaccgttgtccagctcgtggaagggaaattaatttcgccgcagatcatggggaaaaatcttcacattcacccgattaccatcatctttgttcttttaaccgccggaaagctgttcggggttgtcggcattattttagccatcccggggtatgcggtcatcaaagtggtcacgacccatctgtttgattggttcaaaatgcgttcgcatttatatgaagaagaaaaaaatgatgctgtatcgaagtcataaaatcggaacggacatgatatttattataagacaggctttccttcaaaggagagcttctcttttgtaaatgatgaatgaagggaagaatgggatgacactatgggagatgttcacagcagccgttttgggaatcgtggaagggctgacggagtacgcgccggtttcttccacgggacatatgatcatagcggatgacatctggctgaaatccggaagcctgatgaatccggaagccgccaattccttcaaagtggtgattcagctcggttcgattctggcggtggccattgtgtttaaggatcggatattacatttactcggcctcaaaaaaaacgtcacgcgcgatcagcagaagggatacaggctgaccatcgcgcaaatcgccgtcggtcttgttccagcggcggtgctcggctttttatttgaggatttcattgaccgctatttattctccgtcagaacggtcgcttacggattaattgccggagccgtgcttatgcttatagcggactggatcaataaaaggaaagaaacgatcgatacggtggacagaatcacctacaaacaggctttctgtgtcggattattccagtgtctcgccttatggcccggattttcccgatcaggctcaacgattgccggaggtgttattgtgggcttgaatcaccgggcagccgcagacttcacatttattatggcgattccgattatggcgggcgcaagccttctgaagctggtgaaatactggagcagtctttcttatgacatgattccgttttttcttgtcggctttatctgcgcctttgtcgtcgccctcttagtcgtcaagttttttcttcggctcattaaccggattaagcttgtcccgttcgccatttaccgtgtcatcctcggcatcattttaatcatgctcgtgcgataaacgaagaggccccccggagggtcttctttttatgttcgaaaaacgtctcaggaaaatatgagcaaactgaattttctgcttgaaattcatagaagagtcgtctataataaaacatgacgttacagcacggggccatagctcagctgggagagcgctacgctggcagcgtagaggtcaggggttcgagcccccttggctccatacctttaaacccttattctataaataagggtttttttgttttttcatcctctgcagcagcctctgtgttccgcttcatttctaacaactcaaaataaaggaaagagagaaaatgaaaaagaaaatctatcttatattatctctgtcagctgcactggcacttcttttaacggcgctcccggctctttctcctgtcatcttcacgtctgcttcagaaaaaggagccatcaggcatgacatttataaaaaaggatatccgtatcaaagctactttgcgattcttcaaaaagaagaaggaggcggagaggacgggaacctttattatgtaaattggttcaattggaaagatgaaaccggacagacgccgcacgtatgttattcaaaaaaatcgtccgaaggcgagtacaaagtaagctgcggaaccggatcgtaatgatcaagagcccctctgcaatgaggggctctttctgtcgatgtggatccgcttaataccccctatagaacggctgaacataatgccgatacggatcattcggataatgcgtatttggctgataaggcttattcatatcatgaatacccgtgttttcagactgtccgcagtatttatcgggacctatcacagttgattgccggatcggtgaaacggctttttcccactcgtgctcattcagacagtacgtatgcgccatgatctcaggcggcgtcagacggagaatatccgagccatatatcacttcaggcgaaggggcgtcaaatatggccaaaaggtgggttttgtctgaagtggcgacttcataatgccaccacccctgcggaacattcgccacttgtcctggagagatcggataattccgtattttctgggtgaacggattcagcatcgacaccaccgcggaacccgaaatacagtacaccaattcagcggcgttttgatgggtatgcggttcaatcacatttgttttactcagaaagatatctaataatgaaatattttcaagcgtgtttaactgtttaatccccaatacattgataaagttccgagcatctttcgtaaaaaaacggctctcatttacatcataagtgaactgtgtattcggagacgtgtaatcgatatcggaaaccatgcaatcccccgctttcatctttaaacgtatattcccaaatatatgtgtccctgtttcaccgggtgataaaaaaggaggtaaaatccataaattccaaattcaacacaatattgtgacgacttttttaaagattcattttagatatatcttttattcgaaatatctcttactataaagatatattaaaaatacatctttagaagggttgaggatgaacatgctggatgagagaacagtagacatcatcaaaagcacagtacccgtattaaaaacacatggagaaaacatcaccggacgcttttataacctgatgtttcaagatcatcccgaactgttaaatatgtttaaccaaacgaaccaaaagaaacagactcagcgcgcagcattggcaaatgcagttattgcggctgcggcgaatattgatcaattagaacaaatcattccggcggtcagacagatcggccataaacacacaagtatcggtgtaaaaccggaacattatccgattgtcggaaagtatctgcttctggcgattaaggatgtgctgcaggatgccgcaactcctgaaattatgcaggcatgggaaaaagcttacggtgttattgcggaggcttttatcggcattgaaaaagacatgtacagtgaagccggatggcaggggtataaagaatttacggttatacagaaaacaaaagaaagcaaagatatcacatcattttatatcaaaccgagtgacggctcttcgcttcctggatttgaagcgggacaatatatcagcattaaagtgaggattgcggattctccttatacgcacattcgccagtacagcctgtctgatgcttctcgaaaaggcgcatatcggatatctgtgaaaaaggacggagcggtttcttctcatctccacaatgaagttcaagagggagataaacttgaagtcagtgcacccgccggggatttcaagctgtcttcttccgaaaaaccggttgttcttatcagtgccggttccggaatcacgccgatgatgagcatgctgaaaacagccgccgaaaaacagcccgagcgttccgttacttttattcatgccgcgaaaaacggagagtacgccgcgttccgcaaagaggctgaacaagctgcggagaatcatccgaatattaacgtcatttatgtatacagtgaaccggcagaacaagaccgctcaggagacaagcctttttacagcggccggattgatcaaaccttcttggagcagcttcatctgaatcaagatgctgaatgttacttgtgcggatcagcacagtttatgacgcaaatgaaagatatgattcttgcactcgggtttgactctgattccgttcaatttgaattgttcggccctcagctgagcatggcataacaaaaaaagactcctcattgaggagtcttttttatttgcacgatgtgttctttctccgtctttttccctattttattgaaattttcatcaatgaccagtaaaattataaatctagtgattccggaattaaaggaaggttgatatgaaaaagaaagcaaagaccaaaagggtgcttgggtgcctttttgctgtatctcttatattcggattatttctggtatcaatggtattttcgaaattcatagtgacggaagaaaaaccgcctgaagaggtggacgagcagcaggtctttattgacagcctttccgggcatgctcaaattttatatgagaaatatcatgtccttccgagcatcaccctcgcacaggccattctcgaatcggactgggggaacagtgagcttgcggggaaagcgcgcaacctgttcggtgtaaaaggtgattataaaggaaaacacgtcacgatgaaaacggatgaatttgaaaaaggaaaacgaaaaacgattcgggcaaaattccgtaaatacagcacgttttttgaatcaatggatgaccatgccaaattatttgtcaacggaacgtcttggaataaaaagaagtacaagcccgtcattgaagcggacaattataaaacagcggcggctgcccttcaaaaatccggctacgccacagaccccggctatgctgaaaaaattaaagatgtcatagaaacctataacctgaatgaatatgacaaaatcaatgcctctcttaaagcagttgataagaaaggcgccatcaaagaccacgccattgaagacgtgtggtccaagccgtcgaaagagcggcattctattaaactggcatcggcgcaaaagtttaccggccagcatattaaagtcgtatctgaaaaacaaaacggagaatccgtctggtaccaaattcaagtgaaagataagctggtcggctgggttgaccaaaccgccgtccagttaagtgaagaaacataagcatcaaaaaaagccggcagcttgccggctttttttacattccttcagtttcaaaccttttaatatcacgtttatgccccatcagcacaaggcagtcacattcatgaatgacagtctccggagaaggggacagctgaatgtctccattatgtttcacggcgagaatggtgcagccgaatctggcgcgtgcgccgagatcaagaagggattttaaatgcagctttttagtggctgaaagctccacaatgctgtattcatctgacaaatcgatgtaatttaagacgttttcatctgaaaggctttgcgcaatccgcacgcccatatccttttcaggatggataatacgatcagcaccgatcttttcaagcactttgtgatgataatagttttgcgctttcacccaaatattagggatgttcagctccttcaataacagcgtcgtcagcgtgcttgcctgtatattggctccgattgctacgatgacatattcaaaatttctgatgccgagcgactgaagctcgctttcttccgttgaatttgcccgcacggcatgcgtggcataagaggagtatgcgttgacccgctcttcgctgatatcgatcgcaagcacctcatgccccattttaaaaagctctttacagatgcttccgccgaaacggccgagtccgatgacggcaaattgtttatttttgatttttcccaatcctcataactccttaagaaactgttttcgtcactccaaatacaacaaacaagaatgtactcctgtttcaggggtttgtcaatgcgagggccggaagaaagaaaacagcacaaaaaaagaccggctgacaagcgatgagcttgtgccggtccgtttttcgcaattatttgcagttgcatggctgtgtcggcggtgtgctgcgtttttgaacaacaattgtgtcctcagcatagaatttagagccgatgcttaatgatttattttctgcacggaacttatatgtacctgcagcaggcaatgttttattattaagagaaagcttaaattccgctgcgccgagcaaatcaatgtttaacggaagtctgactgttttgccgttattcagaatctgtctttcgcgcaaagcgtgtccgttgactgtatcttttgttgtagccgcaaatccgctaggaagggtaaattccataacgcctaagctcaggatcgtgttcggacggtacgtcaattcgatatcagaaaatgaccattcctgctggctggcacctgtatattttgcaaataaggtagcagtcgctttcgtggacatttccggctcgtgaacggttgagcctgactcagcggcgaatgacgctgtcggcagagaaagaagcaaaaccaggccgaataaacttgccatgacagttgagaaaaacttgtgtttcatttttataaatccccctaaaaaaaatttgctgattgttcttaaaaaagaacgaccatacctataaaaatttaccatcaattttaatggaagtaaatggggttatgttcctatattttctcaaaaataatcaaatcacgacaaaaaacgcctgaatcaaaatcaggcgtttttttcgtccgtttctatcggaataaatttaaaaatctccccgctctgaaccgagtcggcgagccgcttcagccaatgataataagctttcgagctttcaagctgatcatataactgccgcgcttcttcctgtaattccgcgctgccttcctcggccagcaaaacggactgcaaatccgcctgagcctgtacgatggcggacaaattcacctgaacttcacggtcccatttcggcggaaagaaattcgtgaaaaacgtaaagaaatccttttccgctacaaacgtatgcttccgtgtgccgcggtgaaaggtttttttgaccacatttaaatcctgcagctttttaacgcccgtgctcatactcggtttgctcatctgcagttcctcacgcatttcgtcaagcgtcatttcatccctcatatacattgttccgtataaaatcccgacactccgggtgattccgtaaagatccatcgtctctgcaatggaatcaatgacaagatccctggcttgttctatagctgcgaattctggattctcatccatactgtccctcttttcctcttgaagtttaaatttgttaagtcatttctttatgttcttaatcttaacgaatcatgacaaaatgtcaaaatctaaacggactgaccgggttttgacaggcaaaaaaacatgtgttaaattaacattgttaaaaacattaaatttttatttaacaaacttacttctcggtaaggaggactcttatgagcaaaacgctttatatcggcggcgaatggatcagtgcagaaaaaaaacagacccgccgtatcattaatccatttaatcaagaagaaattgcaacggtatgcgaaggagaccgggatgatgcggtgaaagccatcgccgcagccagaaaagcatttgatgaaggggaatggccggtgctttccgggctcgagcgcggacaatttgttctgaaaattgcggaattaatcagacgcgatctgaacgaattagctgagctggaatcgcttgatacaggaaaaacgattgaagaaagtaaagccgatatggatgatatcgcaaatgtatttcaatattatgccggtttggcggataaagacggaggcgaagtcatttcatctccgattcccgattcagtaagtaaaatcgtcagagagccaattggcgtatgcggacaaattacgccgtggaactatccgctccttcaggcgagctggaaaatcgctcccgctcttgcggctggaaacacgatcgttttaaagccgagcgagattactccgcttacaaccattaaagtctttcaattaatagaagaagccggtattccgaaaggggccgccaatctcgtgctggggccgggcgcctctgtcggcgatgagctggcgagaaacctcgacgtcgatttggtctcttttacgggcggaattgaaacaggcaaaaaaatcatgcaggcggcaagcggcaacgtgaaaaagattgccctggagcttggcggcaaaaatccgaatatcgtatttcaagatgcagatctcgaaacagctgcagatcaagcgctgaacgccgtgtttttccatgccggtcaagtttgttcggccgggtcacgtcttttggtggacgaagccattcatgatgaatttttagccgagctgatcaagcgcacgaaacgcatcaaattaggaaacggttttcatgaagatacggaaagcggtccgctgatttccgccgagcatcgggccaaagtcgaaaaatacgtagaaatcggtatcgaagaaggggcaaaactggaaacaggcggcaaacgtcctgatgatcccgcccttcaaaacggtttcttctatgaacctactattttctcaaactgcaagtctgatatgcgaatagtccaagaggaaatcttcggccccgttttaacagtcgagtcattctcttcagaagaagaagtgatcagacttgccaacgataccatttacgggctggccggagcggtatggtcaaaggatattgaaaaatgcgaacgcgtagccgccaaactgcggatgggaacggtatggatcaatgatttccacccgtatttcgcgcaagcgccatggggcgggtacaaacaatcgggcttcggccgtgaactcggcaaaatcggcctggaagaatacacggaaatcaaacatatttaccgcaatacgaaacctgcggctgtgaactggtttcaagcataattaggaggagatacaatatgacattaaatatgaaagtagaaagcatgcataaattccatacattcgaaatcccgacagtcattaaacacggaatcggcgcgattcagcacgcgggaagtgaagtcagagcgcttggcgtcacaaaagcgctgctcgtaacagacccgggaatttataacgcgggagtggcaaacccggtcattgaatctttgcaggaagcgggcatcgaagtcgtcctgtttaacaaagtggagccgaacccgcctgtacgtcttgtaaacgaaggatcagaactgtataaaaaagaaaactgcaacggtcttgtggctgtcggcggcggaagctccatggatacggcgaaagcgatcggggtagaagcgacacacgaaggaagcgtgcttgattatgaagccgcggaaggcaaaaagccgctggaaaaccgcattcctccgctgacaacgatcccgacgactgcgggaacaggttcagaggtcacacaatgggcggtcattacagatgaggaaagagaatttaaattcaatacgggcggaccgcttatcgctgcgcatttaacggtcattgaccctgagctgcacacgtccatgcctccgcatgtgacggccatgacaggtattgacgcacttgcgcacgccatcgagtgctatacgatgaaattcgcgcagccgatcactgatgccgtcgctttaatggccattgaatatgcggcgcattatattaagcgcgcgtttgcggacggagaggatttggaagcaagatacggcatggcgcaggcggcgatgcttgccggcctttcatacggcagtgaatcagcaggcgcggcgcatgcgatgagccagacgctcggcggcatcatccctgtcgctcacggacaatgcgtcgcagctatgatgggaccggtaatggaatacaactggaaaggctatccggaaaaattcgcccgcatcgccaaagcattcggaatcgatacaagcaacatgacaaccgaagaagcggccaaagcgtccgtcaactggatgtatgatcttgtaaaagatttagaagtgccgagtttagaagaacaaggtgtgtctccggacatgattgaacgtttatcaaaagaagccatgaaagatccgcagactttcggaaatccaagagatttgaatgagaaagcatacaactggatttacaaacgctgctttgacttaacgccgaaaacggtataataaatgaaccccgctcctttacagagcggggttttttaaggataatgtcaagaaaaaggcggtggtggctgatgtggaaacgcataacagcaaagacggaaggcgtatatatagcggataccgaacaatttgttaccaaaaagatggacaagcttcgcgcggaatacggcgggtttcccggtgacctgcatttcggactgacaaaaaaggccggcgcgcgtgagccgatgtatgaaagaggaacagaaatttttaaccggagacaaatttcaatcgtgtccatggaggaatgtgatgacattgcggagaagatggggatttctcatatctttcccgaatggctcggcgctaacatcgcaatcagcggtttttctgcgctgacgccgcttaaagaaggaagcagaatgatttttccaagcggtgcgtctctgttgtgcgagggagaaaatgatccgtgcattcagccgggagaagtcattcaatccttttatccggctcagccaaaactcgccgcggcgtttgtgaggcacgcgatgggcagaagaggaattgtctgtattgttgaacgcccgggtgatatatgcacgggcgatgcggtcaccatccattcctatgaaccgaaacgcgccaagaaaaaaatcgagaaggtctgactcagaccttctcgattttttgtttgatttcttctatttgatcgatgtgacgcttttcatgatggccgataaaatcaatccactgccggatcgtcagttcttgaaaaacgggatgcggaagcacacgttcaaaatcttcctcgtttaatgatgaaataactgcggtcagctgctgtcttgccgtatctaattcttgttttgcttcaatgactgagattcggttttgctcaggttcgaggtgtgacggcgccggccgtttatttgatctgtcctctataaactccatcggtttgtcttcgatttttttaaacggtgcgtcttttgcctgctttgataaaagggtctgcgctgtttcgtcaattttctttaaatggtcaaggacttcccgcacgctccactcatcagccgcgggctttcggttgaattcctcatcagagagccctttcagtacttcccaggtctgctgtctggcttcattaaaaatgctcatcctatctcctcctttagagtaaacatatcatatccggattggataatcatgtaatcagccttccttatcagaaaattgaaaccatttacctttacatccgtatataaagtaacactccgacacctcagccgaaaggaggatagaatgtggacatatttcatctgccgtttgaaacggtctatctttacacattgattatttcgggaagtctcacgcttttgattctgttttttcaagatgtgtttcacggcctctcagaagccattcctgtttcatttttaaaccctgcattgattctgtcttttttaacaatcttttcagcctcaggttatatcggcgaaatcgccgctccgctatcaagtcctgtcattgcgttgctttcatttgttctttcggttcttttggtcagcctgcttcacttcttcgtccttgccccgctttcatcagcggaagaatcgctcgcatatcgggagacagatttaaagggcagggtcggcagggtcattacttccgtcccgaaagacggctatggggaagtgatcatagagggaatagggggcgccatttctaaatcagccgtcagctttgatcaagaacagatcagatacggaacggccgtattagtgattgacgtgaaagacggagtgctttttgtgacgccgcatgaaccaatctgatatctaagggggaactgttatgactatgccgattatcattgttatcggaatcgtattctttttactcatcgcacttattgctgtatttattacgaagtaccggacagcggggccggacgaagcccttatcgtgaccggaagttatttgggaaataagaacgtccacattgatgaaggcggaaatcgtctgaaaatcgtccggggcgggggaacgttcgtgctcccggtattccagcaggcagaacctctcagtttactgtcaagcaaacttgatgtctctacacctgaagtctatacagagcaaggggtgccggtaatggccgacggaaccgccattattaaaatcggaggctccatcggtgaaatcgccacagcagctgaacaatttttggggaaatccaaggacgaccgtgagcaggaggcgcgggaggtgctggaaggccatctgcgctccatcctcggctccatgaccgttgaagagatttataaaaacagggaaaagttttctcaggaagtccagcgggtcgcgtctcaggatcttgctaaaatggggctgatgatcgtttcttttacgattaaagacgtccgggataaaaacggctatcttgaatcattaggcaagccgagaatcgcccaagtcaagcgggatgcggacattgccacggcagaagcggataaagagacgaggattaaacgcgcggccgctgataaagacgcaaaaaaatcagagctggagcgggcgacggaaatagctgaagcggaaaaaatcaatcagctgaaaatggcggaatacagaagagagcaggatacagcaaaagccaatgccgaccaggcatatgatcttgaaaccgcaaaagcgcgccagcaggtgacagagcaggaaatgcaaattaaaattattgagcggcaaaagcagattgaattggaggaaaaagaaattctgcgccgtgagcgccaatatgactctgaagtgaagaaaaaagccgatgctgaccgttactcggtggaacaagcggccgcggccgcaaaagcgaagcagctcgccgaagccgatgccgagcagtacagcatcgaagcgatggccaaggcggaagcggaacgcgtgagaattgacggtcttgctaaagcggaggctgaaaaggcgagaggagaaaccgaagcggaagtcatccgcctgaaaggtctcgcagaagcggaagctaaagaaaaaatcgccgacgcattcgaaaaatacgggcaggctgcaatccttgatatgattgtgaaaatgctgcctgaatacgcaaaacaagtctcagcgcctctttcaaacattgataaaattaccgtcgtggatacgggaggaagcggtgaaaacggcggggccaataaagtcacaggctacgcaaccaatttaatggccggtctccaggaaagcttaaaagcatcttccggaatcaatgtaaaagagctgattgagaatttttcaggcaaaggaaacataaaacaaagcataaatgaacttacaaaagaactgagtgattctaacgaacggcacagcccggaataaaaaaacagcaggcgtaaaccgcctgctgtttcagttcgtccgcttagcttcaagaagccgcggcgcagtcatgaataataagataaggacaatggccgaaaggataaaagaaggaatcatgtaagtcgcgttatagacggatgaataaatccagaccggcgtacccttcggagcatagcttccgaaaaagactgctccggagaccacatgcgccgcataccgcagcacactgccggtgaaaacaccgcctataacatacatcgttaaagcgcctctttttttattcaatgccgatgctcgtacaccggaagcgagcaagccgctgaaaccgagaactgcaaatgccgcgatataatcaagaaatagctgcaccgggtgctgcaaaaacaaattgccgatggcgatctggacaatccctgttaaaaagcctgtcgtaagcccggccttcactccccagcggaatgaaatcaaaaaaatcggaatcatcataatagagaccgaacccccttggggcatccggagaaacatgcctgagacaatgtccagaatgacagccgccccggtcataatcgctatttcaattaagcgcacaagctgtgttgaatgattcatagttttccccctggtcagacaaccgtatcaaggataaacaaaaaagcagcgcggggaaggatgggaaaaggtccgcgcgctgcttacataaactgcaaatcatttggctttgccacatccctacgccagcgttaactaacaggttcaaagggtcagaacaaaacgttcactctcagctttaatgctccccttgtggtcatcaagtatttagttcaatcttactatacaagaaaatataccaaaccacaagacagcttatctttctatagaagagaaactgaaataagtatgaaagaaaataattaatgattttttttaaaaaactattgtcatattttcaaaagggtgttatattattaaacgtcgctgatgaacagcagacaacaacgaaaagcttcggaaacaacttaaaaaaagttattgacataaaagaagctgggtggtaagataataaagctgcttcaataagcggtcatgatctttgaaaactaaacaagacaaaacgtacctgttaattcaaagttttaaataaatcgcacagtgatgtgcgtagtcagtcaaactaaggtctgcacgatgcagatcacacagacgttactgcaggatgcagtgaacttagtctgtgttccatttatcggagagtttgatcctggctcaggacgaacgctggcggcgtgcctaatacatgcaagtcgagcggacagatgggagcttgctccctgatgttagcggcggacgggtgagtaacacgtgggtaacctgcctgtaagactgggataactccgggaaaccggggctaataccggatggttgtctgaaccgcatggttcagacataaaaggtggcttcggctaccacttacagatggacccgcggcgcattagctagttggtgaggtaacggctcaccaaggcgacgatgcgtagccgacctgagagggtgatcggccacactgggactgagacacggcccagactcctacgggaggcagcagtagggaatcttccgcaatggacgaaagtctgacggagcaacgccgcgtgagtgatgaaggttttcggatcgtaaagctctgttgttagggaagaacaagtgccgttcaaatagggcggcaccttgacggtacctaaccagaaagccacggctaactacgtgccagcagccgcggtaatacgtaggtggcaagcgttgtccggaattattgggcgtaaagggctcgcaggcggtttcttaagtctgatgtgaaagcccccggctcaaccggggagggtcattggaaactggggaacttgagtgcagaagaggagagtggaattccacgtgtagcggtgaaatgcgtagagatgtggaggaacaccagtggcgaaggcgactctctggtctgtaactgacgctgaggagcgaaagcgtggggagcgaacaggattagataccctggtagtccacgccgtaaacgatgagtgctaagtgttagggggtttccgccccttagtgctgcagctaacgcattaagcactccgcctggggagtacggtcgcaagactgaaactcaaaggaattgacgggggcccgcacaagcggtggagcatgtggtttaattcgaagcaacgcgaagaaccttaccaggtcttgacatcctctgacaatcctagagataggacgtccccttcgggggcagagtgacaggtggtgcatggttgtcgtcagctcgtgtcgtgagatgttgggttaagtcccgcaacgagcgcaacccttgatcttagttgccagcattcagttgggcactctaaggtgactgccggtgacaaaccggaggaaggtggggatgacgtcaaatcatcatgccccttatgacctgggctacacacgtgctacaatggacagaacaaagggcagcgaaaccgcgaggttaagccaatcccacaaatctgttctcagttcggatcgcagtctgcaactcgactgcgtgaagctggaatcgctagtaatcgcggatcagcatgccgcggtgaatacgttcccgggccttgtacacaccgcccgtcacaccacgagagtttgtaacacccgaagtcggtgaggtaacctttatggagccagccgccgaaggtgggacagatgattggggtgaagtcgtaacaaggtagccgtatcggaaggtgcggctggatcacctcctttctaaggattttaacggaatataagaccttgggtcttataaacagaacgttccctgtcttgtttagttttgaaggatcattccttcaaaacataggaacacctgctaaatgcgccacttcctgtggcaacgcatgtgttagcatgtcctatgcgttgttctttgaaaactagataacagaagtaattcacattcaattagtaatgcaagatatcacgtagtgattctttttaacggttaagttagaaagggcgcacggtggatgccttggcactaggagccgatgaaggacgggacgaacaccgatatgcttcggggagctgtaagcaagctttgatccggagatttccgaatggggaaacccaccactcgtaatggagtggtatccatatctgaatacataggatatgagaaggcagacccggggaactgaaacatctaagtacccggaggaagagaaagcaaatgcgattccctgagtagcggcgagcgaaacgggaccagcccaaaccaagaggcttgcctcttggggttgtaggacactctgtacggagttacaaaggaacgaggtagatgaagaggtctggaaaggcccgccataggaggtaacagccctgtagtcaaaacttcgttctctcctgagtggatcctgagtacggcggaacacgtgaaattccgtcggaatccgggaggaccatctcccaaggctaaatactccctagtgaccgatagtgaaccagtaccgtgagggaaaggtgaaaagcaccccggaaggggagtgaaagagatcctgaaaccgtgtgcctacaagtagtcagagcccgttaacgggtgatggcgtgccttttgtagaatgaaccggcgagttacgatcccgtgcaaggttaagcagaagatgcggagccgcagcgaaagcgagtctgaatagggcgaattgagtacgtggtcgtagacccgaaaccaggtgatctacccatgtccagggtgaagttcaggtaacactgaatggaggcccgaacccacgcacgttgaaaagtgcggggatgaggtgtgggtaggggtgaaatgccaatcgaacctggagatagctggttctctccgaaatagctttagggctagcctcaaggtaagagtctcggaggtagagcactgattggactaggggcccctaccgggttaccgaattcagtcaaactccgaatgccgatgacttatccttgggagtcagactgcgagtgataagatccgtagtcgaaagggaaacagcccagaccgccagctaaggtcccaaagtatacgttaagtggaaaaggatgtggagttgcttagacaaccaggatgttggcttagaagcagccaccatttaaagagtgcgtaatagctcactggtcgagtgactctgcgccgaaaatgtaccggggctaaacgtatcaccgaagctgcggactgttcttcgaacagtggtaggagagcgttctaagggctgtgaagcaagaccggaaggacttgtggagcgcttagaagtgagaatgccggtatgagtagcgaaagaggggtgagaatccctccaccgaatgcctaaggtttcctgaggaaggctcgtccgctcagggttagtcgggacctaagccgaggccgaaaggcgtaggcgatggataacaggttgatattcctgtaccacctcctcaccatttgagcaatggggggacgcaggaggatagggtaagcgcggtattggatatccgcgtccaagcagttaggctgggaaataggcaaatccgtttcccgtgaaggctgagctgtgatggcgagcgaattatagtagcgaagttcctgattccacactgccaagaaaagcctctagcgaggtgagaggtgcccgtaccgcaaaccgacacaggtaggcgaggagagaatcctaaggtgatcgagagaactctcgttaaggaactcggcaaaatgaccccgtaacttcgggagaaggggtgctctgttagggtgcaagcccgagagagccgcagtgaataggcccaggcgactgtttagcaaaaacacaggtctctgcgaagccgtaaggcgaagtataggggctgacgcctgcccggtgctggaaggttaagaggagcgcttagcgtaagcgaaggtgcgaattgaagccccagtaaacggcggccgtaactataacggtcctaaggtagcgaaattccttgtcgggtaagttccgacccgcacgaaaggcgcaacgatctgggcactgtctcaacgagagactcggtgaaattatagtacctgtgaagatgcaggttacccgcgacaggacggaaagaccccgtggagctttactgcagcctgatattgaatgttggtacagcttgtacaggataggtaggagccttggaaaccggagcgccagcttcggtggaggcatcggtgggatactaccctggctgtattgaccttctaacccgccgcccttatcgggcggggagacagtgtcaggtgggcagtttgactggggcggtcgcctcctaaaaggtaacggaggcgcccaaaggttccctcagaatggttggaaatcattcgcagagtgtaaaggcacaagggagcttgactgcgagacctacaagtcgagcagggacgaaagtcgggcttagtgatccggtggttccgcatggaagggccatcgctcaacggataaaagctaccccggggataacaggcttatctcccccaagagtccacatcgacggggaggtttggcacctcgatgtcggctcatcgcatcctggggctgtagtcggtcccaagggttgggctgttcgcccattaaagcggtacgcgagctgggttcagaacgtcgtgagacagttcggtccctatccgtcgcgggcgcaggaaatttgagaggagctgtccttagtacgagaggaccgggatggacgcaccgctggtgtaccagttgttctgccaagggcatcgctgggtagctatgtgcggacgggataagtgctgaaagcatctaagcatgaagccccctcaagatgagatttcccattccgcaaggaagtaagatccctgaaagatgatcaggttgataggtctgaggtggaagtgtggcgacacatggagctgacagatactaatcgatcgaggacttaaccaatttgaatgtatgcttactgttatctagttttgagagaacactctcaatggtttggtggcgatagcgaagaggtcacacccgttcccatgccgaacacggaagttaagctcttcagcgccgatggtagtcgggggtttccccctgtgagagtaggacgccgccaagccattacacgtaagtgtaatatacggaggattagctcagctgggagagcatctgccttacaagcagagggtcggcggttcgagcccgtcatcctccaccattccaatcatacataagttggcgtattaggccggtgtagctcaattggtagagcaactgacttgtaatcagtaggttgggggttcaagtcctcttgccggcaccacttttatatgttatactatataagtctcttgtaataagagccattagctcagttggtagagcatctgacttttaatcagagggtcgaaggttcgagtccttcatggctcaccatgtttttcttgcggatgtggcggaattggcagacgcgctagaatcaggctctagtgtctttacagacgtgggggttcaagtcccttcatccgcattgccaaacgcggaagtagttcagtggtagaacatcaccttgccaaggtgggggtcgcgggttcgaatcccgtcttccgctccaactatactataccatccatgccggggtggtggaattggcagacacacaggacttaaaatcctgcggtaggtgactaccgtgccggttcaagtccggccctcggcacttattgttgcgcccgtagctcaattggatagagcgtttgactacggatcaaaaggttaggggttcgactcctctcgggcgcgccatacatacttttgaaaaacgggaagtagctcagcttggtagagcacatggtttgggaccatggggtcgcaggttcgaatcctgtcttcccgaccactttggggccttagctcagctgggagagcgcctgctttgcacgcaggaggtcagcggttcgatcccgctaggctccacttgattttaattgtttttggcggtgtagctcagctggctagagcgtacggttcatacccgtgaggtcgggggttcgatcccctccgccgctaccattggacctttagctcagttggttagagcagacggctcataaccgtccggtcgtaggttcgagtcctacaaggtccaccacttatacggaggaatacccaagtctggctgaagggatcggtcttgaaaaccgacaggggtgtcaaagcccgcgggggttcgaatccctcttcctccgccatatctaatttaattatcatcgcggggtggagcagttcggtagctcgtcgggctcataacccgaaggtcgcaggttcaaatcctgcccccgcaaccaaaaaatggtccggtagttcagttggttagaatgcctgcctgtcacgcaggaggtcgcgggttcgagtcccgtccggaccgccatttataaaaaggctcggtagctcagttggtagagcaacggactgaaaatccgtgtgtcggcggttcgattccgtcccgagccaccatttaatttaatattgttttggcggttgtggcgaagtggttaacgcaccagattgtggctctggcactcgtgggttcgattcccatcaatcgccccaaacaacatgcgggtgtagtttagtggtaaaacctcagccttccaagctgatgtcgtgggttcgattcccatcacccgctccatttttatattgtcatgggcctgtagctcagctggttagagcgcacgcctgataagcgtgaggtcggtggttcgagtccactcaggcccaccatgatgatttttccacagtagctcagtggtagagctatcggctgttaaccgatcggtcgcaggttcgaatcctgcctgtggagccatacggagaagtactcaagtggctgaagaggcgcccctgctaagggtgtaggtcgtgtaagcggcgcgagggttcaaatccctccttctccgccataaggcccgttggtcaagcggttaagacaccgccctttcacggcggtaacacgggttcgaatcccgtacgggtcattaaaaaaaccttgcatagtatgcaaggttttttattatgcgttcatagcgtaaatggtaaaagacaggtatgtggcaaaagcgctccataataaataaggaaccagaagccaggctgaagctttactgtatttaccggcaatgagcaacagaatgagtgttgtcacagccacaagcaggcaatcgatagatgcagcaagcaaatttttctgtgtgaattgaaaatagctgaatccttgattcacgatataattgatgagaagcatcacccaaaaagctttggattctttacatgaaaactttgcatatattaaggctgctgagagcgaaataagcgcaaacaaaaccgcccatatgatgccgatcactgatccgcccagcgtccagtcaggtttttgcagcgcgtcgtaccattcccggtcgatgggaaagagaaaccctgctaaagaaaacaagacatatgtaatgataaatacaataatcgcaccgatatacttctttttcatttgttccctccgtcattcaatgtcaatacgttagttccctttcttggaaagattaaaccgttcaaaaggttcatgcaccattaagtgtatgagttttcggtgtgaaaatgcagcaaaccaattatttgtattcaaaaaccccggcctgccggggttttaatcagcatgaaggtcgccaaaggtcgtcataattccttcttcgtccagttcctgctcatatttttcgtgtgccttgcttggatacacggaaatgttttttccggtaatatctgtcgcgataaagttttcataatcctcagcatagccgatgttttcttctgagttcattgtcatatccccatagctgagcggcggatcttctaaatcctgaggcgtttctgagtttccgtatccctcaacatcctgataagcatcttcactatcgtaagccgcccggattgattcatcatcatcaaattcaaactgtccgaacggtgtttcctcttcaatcggcctgtctttggaaacggcatcctgcgaggaatattccgccaatgtcgtagccgtcggcagagcttcaagtctgtcataaggaatgtccttgccgctgacttcacatgtgccgtatgtgccgttttcaatttgtttcagagagtaatcaatatcgcgaaggtgctccctttcatggtcgagcagagccaggtctttttcccgctcgtataattcggtcgcctgatcgccgggatgattgtcataggaagacaattcgccggatgattgatacgggaattcatcagttaactgaaattgatcattttctttaaagcggcttaaaatatcatctctggcttcttccaattctttttttaagtgtgtgatctgttcgtttgtaagcacatcaatccctcgtttctatgtgatgcttactgttagtatgaacgtttttacgcagaaaaatggtggataaaaatagtcattttcccacgaggaagtaaaaggatacagtgattgccgagagtggggaaagaaaattcaagtttgtttctttattcatttgcgcaaaaaggtttataataagaaatgcaggcattttgtcgtgctcaaatctgtgtgtttgacacaaattcatcacaggtgtattgtattaaaagcatttaacggattatggaggaatgtctcatggtgacaacggtgcagcatacgttccgagaggaagcagatcatgcattacataaagccaaacaagtcaaccatgctgtcttattgagctattcaagacgtattgcgtctttagaccctctatcatttttcaaagacggagcaaaaaaatataaaggcaaacgatttttttggtcagaacccggtagtgaattaacaatagtcggtcttggcacagaagcgctgttccaatcgaatgaaaaaaatggaaaacgttatcacgacgtttttgaacaatgggagcgctttaaaaagacggcttttcatattcatgaagaagaagaggcggcgcataccgcggtcggccctgtcttattcggcggtttttcatttaatcccgctgaagagagaggagacgaatggaacgggtttgaagaaggaatgttctttatcccctcactcatgctgacaaagacggcagacggcgattatttaaccgtcaatcaatgggcggcagacggtaatcaggcagaagatacgctgaaacgtctgaaatctttttcagaagcttttgcagtttcttcaattgagtatgaagaatatcctgttttaacaaaagcggaagaacttgatgtggaaaactggcttgaagccattaaaacagcaacaaatgatatgaaggcaaatcaatatgataaagtcgtgctggcaagggaagtcgttttgtcatatgatgggcctattccggcggagagcgttgtccgcaagcttttgacggaccaaacgacaagctatgtttttgcgattgagcagggagataaatgctttgtcggcgcttcaccggaacggctgatcaaaaaatcaggcaaagacgttatgtccacctgtctggcaggttcaattaagcgcggagaaaatcaacaagaagatgaccgtctcggcaaagagctgctgcatgacgaaaaaaatctcgcggaacatgattttgtggttaagatgatacacgattctttcttgtcgagctgcagtgatgtgaaaaagcctgcaggcccgcaattatataaaacaaaaagtgttcagcatctatatacgccgatcacaggcaatctgaaaacgtccgcttcgctgtttgatttaattgaaaagctgcatcccactccggcattgggaggagctcctcagcagaaagctgttgaagttatcgctgatattgaaccgatgacacgcggatggtatgcggctccgatcggctggatggacggcagggaaaacggagaatttgtcgtggctatccgatcagggctgattgaaggcaaaagtgcgcggcttttcgcaggctgcggcattgttgaagattcagatccgcaatcagaatatgaagaaacacaaattaaactaaagccgatgatctctgctttaggaggtgaaaggctttgacaaacccgattacacattatatcggaagctttattgatgaattcgcgctatcgggtgtcaccgacgcggttgtttgcccgggatcgaggtcaactcccctggcggttttggcggcggcccacccggatattcaagtccatatacagattgatgaacgatccgcaggttttttcgcactcggtcttgcaaaagcccgccagcgtccggtcatgctgatttgtacgtcaggaacggcagcggctaacttctatccggccgtgattgaagctcattattcaagagtgcctcttattgtcctgactgctgaccggcctcatgaattgagggaagtgggggcgcctcaggcgattaaccagcattttctgttcggtaactttgttaagtttttcacagactcagctcttcctgaggaaaaacctcaaatgcttagctatatcagaacattggccggcagatccgtaagtgaagccgggaagcgcccgatggggccagtccatatcaatgtgccgctcagagagcctttgatgccggatttatcagccggaccttttgaaagaatgagaaaggggaagcacgtctcagtcacaacagggattcagtcagctgatcaagactctctctgtcatattacagagcgtctcgcgggtaccgaaagaggtatgatcgtctgcggcgaaattcacggtgaagcagaaaagcagcaaatcatcgcgcttgccgagatgcttcagttcccgattttggctgatccgctttcaaacctccgaaacggggagcatgataagacgctgattattgatgcttatgactcgttcttaaaagatgaagaaataaaagaggcgctgcgccctgacgctgtgatccgcttcggtccgatgccggtttccaaaccgctctttttatggctcagagacgatcctgccattgagcagtttatcgtcgatgaagacggaggatggagagatcccacccaggccggcgcgcatatgattcattgccatccgtctgtgtttttggaagcggtccgttcagctgaaaccggaaaacggccgtccggatggcttgagaaatggcaatttgtcaatgaccggttccggagtcatttacaggccgcgagcatggatgatttatcatttgaaggaaatgtatatcgtcagcttcagcaccttgtccctgaaggcagttcgatttttgtcggcaacagcatgccgatccgcgacgtggatactttctttgaaaaacaagatcgttccttccgtgtctatgccaaccgcggcgctaacggcattgacggagttgtctcctcggctatgggactgtgtgaaggtacaaaagctcctgtcacgcttgtcattggagatttatcgttttatcatgatttaaacgggctgttagcggctaaaaaacttggaattccgcttacggttattttaataaacaatgatggcggcgggattttctcgtttttgccgcaggcatctgataagactcattttgaagaactgttcggtacgccgacgggtcttgatttccggcatgccgccgcactgtatggcgggacgtatacttgtcctgagacatgggaagcatttaaggatgcgtatcagccgcaggcggacaagcccggacttcatataatcgagctgaaaacagatcggacatcaagagttcaattccatcgcgatctgctgcaggccgcagtgcgggaagtgaaaaaagaatggaaactgtaacagttaaaacggccgacggcgtatgctatcgtgctgctgatagcggacacggacacgaatcgtctgaagctattgtttgtctgcatggatttacgggcagcaaagaatcatggatgtttttacgcggcatgtttcccggcgagcgaatggtgatgattgactgcctgggtcacggggagacagacgcgcctgtgcaagcggcaaggtatagtgcgagccggcaggttgcggaccttgccgccgtttttgatcaattaaaacttcacaaagtgaaacttattggttattctatggggggaagacttgcgtattcctttgcacaggcatttccgcatcgggtgtcagcgcttgttttggaaagtacaaccccgggcctcagcacgcttcaggaacgcaaaaaacggattcagtcagaccggaagcttgctgactttatattgcgggaaggtgtaacatcgtttgttgattattgggagagcattccgttgtttgccacgcagctttctcttccggacagcgtaaaggcgtccatccgtgccggcaggctgaagaataatccgtccggacttgcaggaagcctgctcggaatggggacaggctcacagccttcctggtgggaggcattacaccgcatcaaggcgcccgtcctgctcatatgcggtgaatgggatgaaaagttttgcgctattaatcaaaaggtgcataacctgctcccatcaagtaaaatagaggttgtcaaacaggcggggcacacggtacatgtggaacagccgcgaatttttggtaagatagtaagtgagtttttatacggcttgtaaagcataaagaaaatagcttttcggccggactcaggcaaaaatgaaggaggtcatatcaatggctgcagaatggaaaagtgaacgtcagtacgatgaaatcctgtacgagacgtataacggtattgcaaaaataacaattaaccgcccggaggtacataacgcatttactcctaagacggtatcagaaatgattgacgcgtttgcttgtgcgcgtgatgactccaatattggtgtcatcgttcttgcgggagcgggagataaagcattctgttcaggcggagaccaaaaagtccgcggtcacggcggatatgtcggagacgatcaaatcccgcgtctgaatgtgcttgatcttcagcgtttgatccgtgtgattcctaaaccggtcgtagcgatggtatcaggctatgccatcggcggaggccatgtgcttcatatcgtctgtgatttaacgattgcggccgataacgcgattttcggtcaaaccggcccgaaagtgggtagctttgatgccggttacggctcaggttacctggcgcgtatcgtcggacataagaaagcccgtgaaatctggtacctgtgccgtcaatacaacgcgcaggaagcgctcgacatggggcttgtcaatacggttgtcccattagagaaacttgaagaggaaacaattaaatggtgtgaagaaatgcttgagaaaagccctacagcccttcgtttccttaaagcggcatttaacgctgatacagacggcctcgccggaattcagcaatttgcaggagatgcaacgcttctttattacacgactgacgaagcgaaagaaggccgtgattcctttaaagagaaacgcagtcccgatttcggtcaattccctcgttttccgtgatcagatgacactacgaaacagcttgagccgctctggtccaagctgttttcttttcaaaaacagtacttttacctcggagatgataacatgctgacagaacagccgaattggctcattcaaagggctcagctgacaccggagagaatcgctctcatatttgaaaacaaacagatgacattcagagaattatatcatgcttctaaacaaatggccgcgcggctgtccaaatactgctcgcttaaaaaaggagacagggccgcgattttgctttctaacagaccggaaatggtttatgccgttcacgcctgcttcttattaggggcggaagctgtgctgttgaatacgaagctctcaaaacaggaacggttgtttcagctcgaagattcacaggcaaagcttttattgacggaggacggtttttgccgcgaagaatatgaatctgcggtcgccaccgcagatgtggacgagctgcaggctgaagaggcgggtgacatggagccggaagcttatgtaacgcttgatgatacggcgactcttatgtatacgtcaggaacaacaggaaggccgaaaggggtgcagcagactttcggtaatcattattccagcgctgtatcgtctgcgctgaatctgggggtcacggagcgggaccgctggcttattgcgctgccgctgtttcatatcagcggtctgtctgcgctgtttaagtcggtcatttacggcatgcccgtcgtgcttcatcaaaaattctctgtcactgatgtgctggacagcatcagctcccatcaggtcacgatcatttcagcggtgcagaccatgctctcgggcctgcttgcggaaactgaacaatgtcctgaatcactgcgctgcattctgcttggcgggggtccggcaccgctgccgctccttgaagaatgccgcaggaaacaatttccggtattccaatcttacggcttgactgaaacctgctcacagattgtcacactttctccggaattcagcatggacaagctcggctcggccggtaaaccgctgttttcatgcgaaattagaattgaaaaagacggaaacccttgtgcgccgtttgaacatggtgaaattacggtgaaaggcccgaatgtaatgaaagggtattatcatcgtgacgacgcgaaccaggccgcttttcataatggatggttcaaaacgggcgatcttggctatttggatgatgaagggtttttatacgtgctggacaggcggtcggacctcatcatttcaggcggagagaacatctaccccgcagaagtggaagcggcgctgcttgcccatccggctgtagcggaggccggtgtttcgggagccgaagatccgaagtgggggaaagtgccgcatgcttttctcgtgctgacttcttctgtcagttctgaggagctgaccgccttttgccgtgagcggcttgcaaaatataaaataccagctgcttttttcaaggttgacgggctcccgcggaacgcgtccaataaactgatgaggcatcggctgaatgagcttcgtaaaggagaattgtcatgattaagattgaaaaaatcaccctttatcatgtaagtatgaggctgaaaaaaccgtttaaaacaagtattgaaacgctgcaggatcgtaaatttttgatcgtggaagcgatcgacgaaaccgggagaaccggctggggggaggtatcggcgttttcttctccgtggtatacagaagaaacgattcagacatgcgcgcatatgctgagagattttttcatcccaaatgtcgtaggccgcgcgtttttccatccgtcagaagtgcctgacagtctcgcgcgtttcaaaggaaaccgcatggcaaaagcggggcttgaatcagccgtgtgggatctatatgccaagaaaaaggggatatctctcgcagaagccttagggggcaaaagagataaagtgcccgccggcgtggcggtgggtctggcttcggctgatgagatgcttcgggaaattgagcaatacgtaaaagaaggttatcaacgtataaaaataaaaattcagcccggccatgacgttgatctggtcagagccatccgcagccgttttccgaacgtgccgctgatggcggatgccaactcggcttatgaactgaaagacatcagcaggctgaaagagttggatgaattccagctcatgatgatagaacagccgcttcaggcagatgatattgtcgatcaccgccacctgcagaaacacttaagaaccgcggtatgccttgatgaaagcatatgctcttatgatgacgcaaggcgggcgattgagcttgggagctgtaaaatcattaacataaaaccggcgcgtgtaggaggcctgacagaggcattaaaaatacatgacttatgcagagagcatcacatgccggtttggtgcggcggaatgtttgaaaccggcatttcgagagcgcagacagtcgcgcttgcttcgctgccgcaatttacgataccgggtgatatttcctcatcagaccgatactgggaggaggatattgtcactcccgatatccgtatcgaagagggattcatctctgtcccggacggtcccggactaggtgttgaagtcaatcaggaaataatgagaaaatacgtcacccaaatggacgtttttacgacaaacaactgataaaaagacatttcagcgagttgagctgcctgtacgctgctgttatattgaagctgttcattatcaccccttcccccgtttgaaccggctgtatcagccggtttttttaataggcggatgcgatgatttttttattcttcaaacagtgccggctttacaacgcaggtgctgctttccggctggggcaaacatgtacatcttgataaaaaattctgagcttgtcatgaatgcgatactgattgtaccgtctgccgcctatatttgccgccgaaccgcctttttgccatgcttctcatccgcgcggttttctccggctcagggaggcttgcggcggaaatgaaaaagagctgtataaaacagctcttttcttttataaatcttgcggtttaaaggttttgcaatccgtttcttcacttttttcagcggtttcgcctgtatggctgaccacataaatagcgtcggccgtgcatttgtttcctctgccccaatatgaacagttattgacttcacacagaattttttggtccatgctggctcccctccaagataaaaggtacgccattagtatgagccgccctgatttttgttattcctcctggcggatataacgtctgtctttcataaagagcttccagaagaaataaaacccggggaacaaaatgatgaaagcgacgatatacgtcataaacagcgccctgaaggttgccggctccgtaaatcctgacatgaccgtaatatccggataaatcatataaggaagatgagcccgtccgtatgcatagcttgccagaaagtattggagcgcaatggcgatcatggcgattctcggtttgccgaggttgcggccgaagcgcttattcggcaaaaacagagccacgccggcaatgataaatgtaatgacagacagaatgagccatgtcttgtctttcatcatccccgtatacagccagccggcttcagagcgtaatgtcagcataatgaagaaggcaaacagaagcgacagcggccctgttattaaagagctccgtctgtagatgcggtacgcatgctcctcttccgcaacatttgaaaaatcggccagaagcagtgaagataaaaataaagtgcttaaaatggcaaagccgataaacgcatacgcattaagacttgtaaagacatttgccaaattcaggtgatacactccgcccgtcttctcaataaaccctccgtgtgtgaccggaaggaccaaaatcagcacagcgggaataatgaagcctgaaattccggagatatatctcatgatttttctttccttcgccgtattggagaagacgagaaagccgctgcggatggctaagagcagcaaaataatacttcccgggatcaataaaacggttcccagcacgaaggttgcccctggaaagaagctgaatagggcgacaacgatcgcgacgataaagacgttggtcacttcccatgtcggggacaaataacggttggcgatgtttgtcgcctttgtttgttctttatttaaatatatcatcgaccaaaagccggctccgaagtccatcgttgccatgaccgcgtagataaacacgaagccccatacgattgatatcgcaatgagagcatccatggtaatgtccatttcaattcagccctttctattgttaggattccgccgcttttacatcctcctcaacaggatgtttgcggaaataataaagcagcacataaatgactgcggctgccaaaatggcgtaaaccactgtgaacaggatgaacagcaaaccgattgaaccggttgtcgtgacgacatcagacgttttcaggagatggtaaatcacccatggctgccgccccgtacaagcgaatatccacccgaattcaattccgatcagactgagcggtcctgcggttaaaaataaaatcaaaagccaagtcggaaagctgtctttctttaaaatttttctccacacgatgccgatgatggagtacaaaatgagcagcatcccgatgccgaccattccgttaaacagtgtatggatgaataaaggcggccactcgtctttcggaaacgcgttcaatcctttgacgacggtatcaaagctgtttgcggccaaaaagcttaaagcccacggcacttctatcgcccattttactttttcttcttttgcatcagtaaaacccccgatcgcaagcggagcgtgtgatctagtttcaaacagcccttctgcgcccgcaagcttctcaggctggtattcgtaaagaagctgggctgactcgtgaccgtttaaagaagcaataatagagaatatcccgccgatcgttaaagcgagcagcagcgcttttcggtgaaagcggtatacctgctcctgttttctcgttctcagcattttataagccgcaactgacgcgacgataaatgcaccggtcatgaaagccgtcagtacgacatggcccgcggtggtgaaaaagcttggattaaaaaacgctgcccacggttcgacgtcagtgattttgccgtttaaaattttaaagccggccggcgttccttcaaatgcgtgaacatttgtgattaagacggcggatgccgcggcgccgatcaaaacgaaaataacggcaatgatgcgcatcgccggagtcagccggtcagcggcgtagacataaatggacataaacagcgcttcgataaagaaagcataaatttcaatctgaaacggaagtgacatcaccctgccgatgatctccatgaatccgggccacaaaagggcaagctgtgtacccgcgatcgttccggtcggtatcgccacgccgagcagaacagcctgcgccttcgtccaccttttcgccataatggcataatgcggatcttttgttttttgataaatcaattcggccattaaaatcatcagaggcaagccgacaccaagcgtcgcaaaaataatatgaaagcccatggttgtcccgaacagacttctggctaatactaaatcatccacgatcataaaccgcctttctaaattaccgttttatgtaatgtggttatattatttgctgaagcgattagattattcttccgattccatatatgtgcagggtttagaaatcaagggatcagggcatatatgattgacaagcgcctatttaaggtttagaataaaacgtaattattacgatttaagaaagggagatcaccatgaaaaaagatattcatccggataaccaccaagtgatttttcaagatgtgaacagcggctaccgctttttaagccattctacgaaaacgtcagaggaaacggcagagtgggaagacggaaaaacatacccgctgattaaagtggaagtcagctcagatacgcatccgttttatacgggccgccaaaaattcaacgaaaaaggcgggagagtcgaacagttcaacaaaaaatacaatatggggaaataagacaagcccaatagggtttgtcttatttattgagcactttatcatctcgtgcggggagtgacgaaatgacccgccttatgttatattgtgaataaaaaagcagaaaggaaacaccaagatgagtcttctaaacgatatcatgcaatttaatgagcagttcactaaaaacaaagattatgaaaaataccaaacatctaaattcccggataaaaagatggcaattttgtcctgtatggacacacgtcttgtagaattgcttccgcatgcgatgaacatgcgaaacggcgatgtgaaaattattaaaagtgccggcgcgcttgtcgcccacccgttcggaagcatcatgcgcagccttttagtggccgtatacgaattaaacgctgatgaagtctgcgttatcggccaccatgattgcggcatgagcaaaatcaacagcgaggatatgcttgataaaattatcgaccgcggtattccgaaagagcggattgacatgctgaagcactcaggtgttgatcttgatcaatggctgaaaagctttgattcagtagaagcgagtgttacagacagcgtaaacgtcattaaacaccatccgctattccctgacaatgtcccggtgcacggtctggtgattgatcctgaaaccggtaaacttgatctggtgatcgacggctaccagcatatggactaatgttttcgttttttgtccggtacgggatcaacaccgcccggatgaaaagggtggcactttaaaatccgcttcagtgtcagccatccgccttttaatgcgccgtgagtcttgacggcttcgattccgtactgtgaacacgtcggataaaagcggcatgacggcggcgtcagcggagagatgaacttctggtatccgcggatgagcgcaatcattatggttttcattaaaaaaccacctttctgatgctagtatagaaaaaaaatttcagattgaaaagctttcgccacaattcttatcggaaaactgtgttataatggatgcatattctgaaaaaaagggagtgccattatgccttcagtagaaagttttgagctagaccataatgcggttgtggctccgtatgtaagacattgcggagtgcataaagtcggaacagacggcgtcgtgaataagtttgacattcgcttctgccagccgaacaaacaggcgatgaagccggatacgattcatacgcttgagcacttgcttgcgtttacgattcgcacacattctgagaaatacgatcacttcgacatcatagatatctcaccgatgggctgccagacaggctattatcttgttgtcagcggcgagcctacagcggaagaaattgtagacctgctagacgctacgctgaaagaagccatcgatattacggagattccggcggccaacgaaaaacagtgcggccaggcgaaacttcatgatttagaaggcgcgaaacggctgatgcgtttctggctgtcacaagataaagaagatttgctgaaagtgttcggataaaaaacaggcctttttgctgacatgcaaaaaggcttttttacatatttctaaaaaatgtcacaccttatgtgtaagcgtttgctaaaatagaagcaaacatgaaggagtgatgggatgaaacgggctgtattggcaggtatgtgcggtatggtatttctattatcttcctgcgggggcaattcggacaaaaccgccgcggatgaggagcctaaagcgcttgaggtcaagcttacaggaccggaaacggcagcaccgcatgaaaaaacggaatacaaggcggaggttttttacggcggcaagcgtgtcacggatgcggatgaagtcatgtttgaagtatggaaagaaggaaaaaaaggcagcagcaaaacaagcaaggccaaggaggaaaaaggggcgtatcacctgcggactgaatttgatgaagagggtgtgtataccgttcaatcccacgtaacggcaaaacagcagcataatatgccgactgtaaaagtacgtgtcggggatgctgaagctgccgatgattcctccggccatgaggaacagacgcatcatcattaaggattgtttttatccgtcaagccttttgatgcgtcctccggcgggtcaatcgtatgttttacgttataagctcttacagtcgaccagatggataaaagcagcacggcgagcacgataagaaagccgaagctcagaagaagcagcatgaaatccctcctttttaacaaatcataacatattttccatccgtaaaatcaagggctaaaaatttatgttttaacacacgatatatagggtatatcaatagtaaatcaaaggaggaagataggcatgtcagaaaaactattggaagcggtcaataaacaagttgcaaactggacggtcatgtatgtgaaattacataactatcattggtacgtcaaagggaaggactttttcacattgcacgaaaagttcgaggagctgtataacgaaacggctacatatattgatgatctggcagaacgtctgctggcattgaacggcaagccgatcggcacaatgacggaatcattgaagagtgcttctataaaagaggcggaaggcaatgagagcgcagaacaaatggtacagaacatttatgatgatttcactgtcattgcggaagagctgaaaagcggcatggatctcgcagatgaggtcggagacgaaacgaccggagatatgctgcttgccattcaccagaatatcgaaaaacataattggatgctgaaagcgtatttaggataatcaacaagggaagaccggggctataaagcactcggtcttttatttggctgccgaagagaggtgttgtccatttttctgaaaaatccagtccgttccattcacttttcatagaataatgtaaggccgtttctgtgaaaggatgttggatcaagtgggcaaagactttggcatcttttcgttttttgcagtgatcgtgtcggcagcggggtttttctttggcggttttcagtattcgtttctgattttgctatcggtcatggcgattgagtttatcagtacaagcttaaaagaatctcttttgcagcagctgagcgcaagaaagctttttgcgcggctggtcaaaaaaatcgtgaccctggcattagtctcagtttgccatttttttgatcagctgcttcattcagaaggcgccatccgcaatttggctattatgttttatatcttatacgaatcggttcagatcgtgattacggcaagctcgctgggcatcccggttccgcaggtgctcgtcgacctattggatactttgaaaaataaattcaagcgcaaaccgtaacatttgcttcaaaggaggctatactagcgggtatgatggttttcctctgaatttttgataaagggcttccgaacaaacgcaactgtggtatgatgtatggaagatatgaaggaacggattagagggataaacatgtacgagtttaaagactattatcagaatactgttcagctctcctttgaacaccagcctttttcagacagcccgaagcatgtatgggtcatatgccgatatggagataagtggcttttgactgagcacgaagaccgggggtttgaatttccgggcggaaaagtggagccgatggaatgtgcggaggaagcggccctgcgcgaggtgaaagaagaaaccggcgccgcggtaagacatctgaagtacgtcggacagtataaagttctcggcagggaaaaggtaatcgtgaagaatatttattttgccgatattgaaaagcttgaaaaacaggctgactattttgaaacaaaggggccggtgctgttcagcgaactgccggagaatctcccccgaaataaaaaattcagtttcattatgaaagattcggtgcttccgatcagtctgaaaaagctgaaagaggacggcgtatttcaatcataaaaaacggagacccggcgcttacgcacgggtcttttttatatttttcctttcgtccattttctttctaacagttcgactccctgatacatcaatgtcgcaaaaatcgcgatgatcagaaggcttaagaacacaagagtgaaattgaagacctggaatccgtaaatgatcatgtagcccagacctttttcggaaacgagaaactcgccgacgatgacaccgacccaggataaaccgacgttcactttaagcgcggaaataatcgcgggggcgcatgccggcagaatgacttctttaaacatgatgcttcttttcgctccgaaggttttcatcaccttaatatagttttcatccacttcctgaaaagccgtaaagacgacgattgtcgtgataatgacactgatgactgctcccatggcgacaatgcttgtgaaattcggtccgagtgccacgatgagaatcggtccgagtgcgaccttcggcatcgcgtttaaaatgacgaggtacgggtctaaaacccgggcgagtctgtttgaccaccataacagagcggcgaggcatgtgccgagaagcgtgccgagcaaaaagccgagaacggtttctcctaaggttacgccgatgtgcgccgcaagggatccgtccgcaatcttttcaactaaaagcctgcaaacggcggagggtgagctgaagattaacggatcgatccagcccgccctgctcgatatttcccacccggcaaaaaatacgatgaaaatggcggcctgatacgcacggatccggagcttttctttttggtgtcttttcttaaactgctgatgaagctgttcaatcgtgccgctgctgtttttcaagggaattcagctccttccatatggtttgaaacagcggctgaaaggccggatcctgacgcgcgtcaaacggatctaaagccgcgagctccttaggcacggtgaatatttggtggatggtgcccggctgattcgaaaataaatagatcgtatcgctcatggcgatggcttcaccgatatcgtgggtgacgagcacggcggttttttgaaaatcctttaatgttctgaagacaaggttttccaaagaaagcttcgtttgaaagtccagcgcggaaaacggttcatcaaggagcagcagtccagggtccggcgcaagagttctggcaagtgccgcccgctgccgcattccgcctgagagctctttcggatatttcttttcaacgccgattaatccgagcttaggcagaaggctgagaacttcagctcttttttcttctgttaatgtttttgaaatgtgtaaaccgagcagcacgttttcctcaatcgatttccaaggaaataaataatcctgctgaagcatataaccgatttggtgttctttatggttcggcacgcttccttcgatcagcacccggccttgcgcaggggtgataaggccggccagaatggacaggagtgttgtttttccgcatccgctcggcccgagaaaggagatgaaatcccctttttcaatctgaaaatgtatatctttcacggcggttgtcttttctttaagcgagaaataagtatgtgttacatgatccacatgtaaaaaagacattcatgttcctcctattgttctgaggtgacttttttggcgatttttgtgttgacgagtttgctgtacggaatgtgtttcgggagctctccggcttcatccataatagattgaagcagttcccattcatccttttgcagaactgggtctgcagagaatgacttttgttttttatagcgctctatcgatgtttcgataatggccgggtctgtatcggcaaattccttctgaatcgtttttgcgatgtctttggccggatggctttccacccattgctgggcgcgatagatggcgcgggtgaatttttccgccgtcttttcattgtttttcaaataactttcttttgccataaaggttgtgtatggcacttggccggaagcttctccgaaggatgcgacgatatgaccgatgccttctttttcaaattgggatgccgtcggttcaaacagctgcacataatcacccgttccggatgcgaatgcgttggaaatattggcgaaatcaatgttttgaacgaggttaatgtcttttttcggctctatgtgattctttttcaggacgtactcaccggccatttggggcatgccgccttttcgctggccgagaaatgtttttccttttaaatcgttccatttgaatgatttctcatccttccgcgacacgagaaatgtgccatccgtctgcgtcagctgcgcgaaattgatgaccggatcttttgctccctgcgcctccacgtaaatggatgtttcagaaccgaccagcgcgatgtctgacccgtttgacaaaagcgatgtcatcgttttgtctccgccccatgttgtttgaagtgacacttggagcccttcttttttaaagaaatcttttgcttcagcgacatacagaggcgtatagaagatggagtgtgtgacttccgccacctttaccttcgtcagactttcttcctgtctgcaagccggaagaatgagcaggaaaaaggcgcatatgacaaaaacgcagcccgctttgagccatttgttcacggtgtaacctccttgttttaagcgttaaaataaccttttctgctttacatatcgtatgatgggtataaaaaatgtgtgagtgcccatattcacgttgggaaagaataaaaaaactgatgatctaaggaggcgcattgttttgctggtagaaaagaaaaggttcccgtctccgagtccgcatgtccgcctctttgcggtatgctatgagtcagaagggctgaaggtaaaggggctccttgccgagcctgcggcgccgggaacatatgacggttttttatatttgcgcggcggcataaaaaatgtcggcatggtacgccccgggagaatcgttcaattcgcttcccaaggctttgtcgtgtttgcgccttattacagaggcaaccagggcggcgagggaaatgaagattttgcgggagaggacagagaggacgcgttttccgctttccgcctgcttcgggagcatccgaacgtcagggaagggcgggtgcatattttcggtttttcccggggcggaatcatggggcttttgaccgcgattgaaatggggcatcaagcggcttcactcgtttcatggggcggtgtgagcgatatggtgctgacttatgaagagcggaaggatatgcggcggatgatgaagcgggtgatcggcggcacgccgaaaaaggtgccggatgaatacagatggcgttcgccgtttgaaaaagcagaccgcattcaggcccctgtgctgctcatccatggagagaatgatgaaaatgtttcgatcgaacacgcccggatgatcgaggacaagctgaaagaggcggggaaaccggtggaaacttggtattacagcggttttacgcattattttccgccgcaggaaaacagacgcattgtccggcggctggcggaatggatgaagacacggtaagatgcctgatttatgatatgataataaagaataagagaatgaaaggggattttcattttgggaatgcctgttgaatttaataccatgattgtgacaaaaggcaatgaaaaacggatagaggaaaatatctttttattggagaaagagggctaccgcgtctatcctcttgatattccgatggacgtgcgcaaaacgaaaaccggcgagaaatccggcaccggcgaggtccagaagctcgaatgggcgaacggccggacaagcattacatacagactcacttcgcttcattcgacaaactgaaaaaacaaaagccgagggcataaacgcccttggcttttttgattacacgagaggtccgccggttttggcaatcgagtctgcatgggaaaactttttaaagttttctttaaactcattggctaaaaacagcgctttttcgttgtatgcttgtttatcgctccatgtgttttcaggctgaagaacttcatccggcacgcccggaacatgaacgggactgtgcaggccgaaaatgctgtctgccgtcatgtcagtctggttcagtctgccgtcaatagcggccttgaccatcgctcttgtatacgaaagtttcatccgttctccgactccgtaccctccgccggtccagcctgtgttgaccaggaagacttgaacgccgtgttcgtcgattttacgcccgagcatttcggcatatacatgcgccggaagcggaaggaacggtgaaccgaagcacgtcgagaaagtcgtttgcggagatgtcacgccgcgttcggttcccgcgagtttactggtgtatccgcttaagaagtgatacatcgcctgttccttcgtcagtttgctgatcggaggaagcacgccgaatgcgtccgccgttagaaagacgatcgcctgcggatggccggcaatgctcggctgcacgatattgccgatcatctcaatcggatatgcggctcttgtgttttccgtgtagaaggaattgtcgtaatccgcttcacccgttttttcatcaagcacgacattctcaagaacagacccgaagcggatcgcacgaaaaatctgcggttctttttcctcgctcagattgatacatttagcgtaacatccgccttcaatgttgaaaacgccggaatctgaccagccgtgctcgtcatctccgatcagtttgcggtccgcatcggctgaaagcgtcgttttccctgtgccggaaaggccgaaaaacagggcgacatcgcctttttcaccgacgttggctgagcagtgcatcggcagtatatcctgctgcggaagcaggaagttcataatggagaatattgattttttcatttctccggcgtattcggtgcccccgattaaaatgacgcgcttttcgaaagagacaatgataaatgtttccgaatgcgtgccgtccgtctccgggtctgctttaaaatgcggagctgagagaatggtgaaaggctgcgcttgcgggtctctttcatccgtttccggtctgataaacagctggcgcgcgaataaattgtgccacgcaaattcatttacgaccgtaatcggcagtctgtatttttcatccgctcccgcgaatccttcaaacacaaacagttcatcccgctgttttaagtagctgacgactttggcgtacagcttttcaaacgcctcttcagaaatgggctgattcaccgcgccccaatcaatttgattttctgtgctttgttcacggacgataaatttatctttaggtgaccggcctgtatatgcgccggtagtggcgcgtacggcgcccgttgatgtcagcgttccttcatttcggctgatcactttttcggtaagttttggagccgataaattatgatgcacattcggacttgcaagtaatgcttgaagatctgcggttaaatcaactaatttcataaaaaccttcctttgccggtttatttgtatttcgctgaatgtggaattagtataacatatatctgaaaatagtctatactatttacggttttttgtttgtgtttttccattgcttcccgaaataaaggcgcgcaatcgctttaattcatattgacactttccgcccttttacgataagatatttcattgagcggatactcttatcccgagctggcggagggacaggcccgatgaagcccagcaaccggtttctctgtaaaaaagcaggtgaaaacactgtgggaaaccaaggtgctaacctgatgcaaggtttaatattttccttgagcgataagagtgaaaggcacacagaccaaaccctttcctcgagtggaaaaggtttttttatttcataaaatatgccaattaacattctctgatatagtatgacattgtattaagagggagcgagttccgtatcatatgagaaggtcttgcaaaagatcttttttcaggaggaaaagtgaatgagtaaaaaccgtcgactatttacatctgaatctgttactgagggtcatccggacaaaatctgtgaccaaatttctgacagtatcttagatgagattttaaaaaatgacccgaacgcgcgcgtggcctgcgaaacatctgtaacgacaggacttgtgctggtaagcggagagattactacgtcaacatacgttgacattccgaaaacagtccgtgaaacgattaaagaaatcggctacacacgcgccaaatacggatttgatgcggagacttgcgctgttttaacatcaattgatgaacagtctgcggatatcgcaatgggtgtcgatcaggcacttgaagcgcgtgaaggcacaatgagcgatgctgaaatcgaagcaatcggagcgggagaccaaggcctgatgtttggttatgcgtgtaacgaaacgaaagagcttatgccgcttccgatctctttggcgcataaactagcccgccgtttgagcgaagtccgcaaagaagacattcttccgtaccttcgccctgacggcaaaacgcaagttaccgttgaatatgatgaaaacaacaagccggtccgcatcgacgcgatcgttatttcaactcagcaccacccggaaattacgcttgagcagattcagcgcaatctgaaagagcatgtcattaaccctgtcgtgcctgaggaactgatcgatgaagaaacaaaatacttcatcaaccctacgggacgtttcgtaatcggcgggcctcaaggtgatgcgggtcttacgggccgtaaaatcatcgttgacacatacggcggatatgcacgtcacggcggcggcgcattctccggtaaggatgcgacgaaggtagaccgttcagcggcatacgctgcgagatacgtagcgaaaaacatcgtggcagcaggtcttgctgattcttgtgaagtgcagcttgcatacgcaatcggcgtggcacagcctgtttctatttccatcaatacatttgatacaggaaaagcttctgaagaaaaactgatcgaagtcgtacggaataacttcgacctgagacctgccggcattattaaaatgcttgatctgcgccgcccgatctataagcagacagctgcttacggccacttcggacgtcatgatgtggatcttccttgggagcgtactgacaaggcggatgcgcttcgcaaagaagcactaggagaataattttatagccgcttacttaagcggctttccctttttgtagatgctgccatgcttattttttacatagcgtgaaaccaatggcgtaacaaagcgtctataaaaagggggtccaattagaaaattacacttatggaggctatactatgtgtggatttgtcggtgtttttaataagcatccattaactcaaaccgcagatcaagaagagctaatcaaacaaatgaaccaaatgatcgttcaccgcggtcctgacagcgatgggtattatcatgacgagcacgtcggattcggcttcagacggctcagtattattgacgtagaaaacggcggacagcctttatcatatgaagacgaaaaatattggatcatttttaacggcgaaatctataactacattgaattgagagaagagcttgaagcgaaaggctacactttcaatacagattccgataccgaagtgctccttgcgacataccgtcattataaagaagaagccgcttcaaagcttcgcggaatgtttgcgtttttaatctggaacaaagctgaccgcgtcatgtacggcgcgagagacccgttcggaattaaaccgctgtattacacaaccatcggggacaaagtatattttgcatctgaaagaaagagtttaatggccgctcaaaacggtattgatcttgatacagcttctttacagcaatatatgtctttccaattcgttcctgaaccgagcacgcttgacgctgaagtgaaaaaagtcgagccgggcagccagtttacgatccgcccggaaggcgacatcgcgtttaaaacatatttcaaagcgaacttcaagcctgttcagtctgatgaagataaattggtgaaagaagtcagagacgcaatctttgactctgtcaaagttcacatgagaagtgacgttcctgtcggttcgtttctatccggcggtatcgactcttcttttatcgtttcagttgcgaaagaatttcacccgagccttaaaacattttccgtcggttttgagcagcagggctttagtgaggttgacgtagcgaaggaaacggctgccgcgcttggtattgaaaatatcagcaaagtcatttctcctgaggagtatatgaacgagcttccgaaaatcgtctggcactttgatgacccgcttgcagatccggcggcgattcctttgtactttgtcgcgaaagaagcgaaaaagcatgtaacggtcgcgttatccggggaaggcgcggacgagctgttcggcgggtacaatatttaccgcgaaccgctttcgcttaaaccgtttgaacgcattccgtccggtctgaaaaaaatgcttcttcatgtggcgtccgtcatgcctgaaggaatgagagggaaaagcctcttagtccgcggctgcacaccgcttgaggagcgctatatcggtaatgcgaagatttttgaagagcccgtgaaaaaacagctgctcaaacattacaatccagagctttcataccgtgatgtcacgaagccgtactttacggaaagccgttcatacagcgacataaataaaatgcagtatgttgacatccatacgtggatgcgcggcgacatcctgttaaaggctgacaaaatgacgatggccaactcattggaactgcgcgtgccgttccttgataaagtcgtgtttgacgtagcttcaaaaattccggatgaattgaaaacgaaaaacggcacgacgaaataccttctgcgcaaagctgctgaaggggtagtgcctgatcatgtgcttaaccgcaaaaaactcggcttccctgtgccgatccgccactggctgaaaaatgaaatgaacgaatgggttcgcaacatcattcgcgaaagtgaaacagacgcttatattgaaaaggattatgtccttcagcttctggaagatcattgtgccgacagagcggacaacagccgcaaaatctggaccgtgctgatcttcatgatctggcacagcatcaatgtcgaaaaaagactggtgccggaagagctgaatcatcagccgaaagaagtcattttcgtttaatccaaaaggctttcgagttatcgaaagccttttttctattgttttttgtaaaccgtctattccgctctgttttcgacaaagtattacgcaatattcagaaaaaggttataataggactaatcgggtagattccggaaaaagttttctggctatttcgtctcggtttgttgtttctttgtcaaaatcagggggagggagagttatgcaaaacaaagaaaaaacgcttcaccgcggcttggaagagcggcatatctcgcttatgtcgttgggcgccgcgattggagtcgggctgtttctcgggtctgcttctgccataaagcttgccgggccggggattttagccgcttacgcctgcagcggactgattatgttttttattatgcgggcattgggggaaatggcgattcaaaagcctgtagccggttcattcagccggtatgccagagattatatcggcccgcttgccgggtttttaacaggctggaattattggtttttatgggtcgttacctgcatggcggaaatcaccgcggtcggcatttatatgggctactggttccctgacgtgccgtcatggatctgggcgctttgtgcactcgtcattatgacggctgtcaactttctggcggtcaaagcgtacggtgagcttgaattctggtttgcgctcattaaagtcttggcgattctgtcaatgatcgcgatcggtctggtgatgatcgtattcggtctcggaaacggaggcgttgcgctcggaatcagcaatttatggagccacggcggctttttcccgaatgggattaaaggggtgctgctgtcgcttcagatggtcatgtttgcttatctcgggattgagctgatcggtgtcacagccggtgaggtcaaaaatccggaaaaatcactggcgcgggccatagatactgttttttggcgcattctcattttttacgtcggagctttgtttgtcattatgtcaatttatccgtggcaggaaatcggttcaggcggaagcccgtttgttttgacatttgaaaaaatcggaatacccgctgcagccggaatcattaattttgtcgtattgacggcggctctttcttcctgcaacagcgggatcttcagcacggggcgtatgctgttcaatctggcggagcaaaatgaagcgcctaaagcatacggtacggtcacaaaaggcggtgtgccgggaaaagcggtattggtttcagcgggtgcgttatgcatcggcgttttgctgaactacgtggtgccggcgaaagtgtttacgtgggtgacgagcattgcgacgttcggagcaatttggacatggtcgattattttgctttcccaaatgaaataccgtaaaagcttacagccggaagaacggaaaaaactcaaatataaaatgcctttataccccttttcctcatatatctcgctggcatttctggcttttgtcgttgtgctgatggcttttgatgcagagaccagggtggccgtcatcatcggtcctgtctggttcggcatattattagccgcctattacggcaaaggattccataaaagaaaagacatagatctggaaaacggacagacattcgccgaaaaagcgtaaaaaagagcccgctgaaatgggctcttttttcataggatcgggtaaaagggggaagaataaaacaaattcctgaacattttgcttctgtttcctgacaatcgggagaatgcaaatggtttttacttaaataatattttgaaaaatggtacagtagtaaaacaaagctgatcttttttatttctcttgcattgttttatagtatcggcctttttcaacatattccgttctgattctttccatgtcccgtatgtcttcttctgtcagccggcggataacctttgcgggccggccgaacgcaagacagccgggaggaatggttttgcccggaggaacgagacttccggcgccgataaacgcgccttctccgatttccgccccgtcaagaatgacggagcccataccgattaaagcattctttctgatgattgcgctgtgcagtgtaacctgatggccgatcgtgacgtcatcttcaataagaagcgggcggttcgggctttgatgcagacagctcaagtcttgtatgctgactctttttccgatccttgtcggcgcaacatcccccggatgactgccgagaaccaaatgctcgattgttctccgatcacgacgtcgcccgttatgacggcgttatccgcaatgaacgcttcaggatgtacgtcaggcgtaaattgtttataagggtagattatcatgtctcatccttctttctctaaatttatgtaagaggtgaactgcatgtggacttggaaagcagacaggcccgtcggtaccattgtcattatccacggggcgagcgaataccacgggcgttataaatggctcgttgaaatgtggagatcttccggatataacgtggtgatgggcgatttgcccggtcagggaacgtcgacccgcgcccgagggcatattcgctctttccaagaatacattgatgaagtagatatatggattgataaagcgagaacgcttgaagcgcccgttttccttttgggccacagcatgggcggactgattgcgatagaatggtttaagcagcagagaaatccccgcattacggcactcattttatcatcaccttgtctgggtctgcaaataaaagtcaataaagtccttgattttgcgtctaaaggactgaacgtcctcgctccgtccctcagagtggattccggcttatcacctgatatggcaacgaggaatgcggatatgattgaagcggatcaaaacgattctttatatgtcacgaaggtatccgtaagatggtacagagagcttttaaaaaccattgatgccgctatggtgccgactgatgcgtttttaaaggtgccgcttttgcttatgcagggcggtgatgacaaaatcgtcgataaaatgaaagtccgcaaatggttttccggtgtggcttcccataataaatcgtaccgggaatgggaagggctttatcatgaaatatttaatgaacctgaaagagaaactgtgtttaaggcggcaaaagcctttacagatcagtatatttgaattcgctgggggtgcatatgttgacagtaccggaacatccttttaaccttatggcaaaagtgtatcgggaaatttttccgctcgttcatcaggaattgaacatgtggcgggaaaaatcagattccattaaaaataccgaactgcggcagcaggcggccgcaagtatccgcgataagtcgtttcattgtgaaggaggcggcattttagccctgctttcgggagagcagaaacagaaatgcgtgcaatttatcatcgcgtatcagacaatcagtgattatctggacaatctgtgcgaccgcagcacctcgcttgatccggaggacttccgcatgcttcatctttccatgcgtgacgcgctgacggtcggtgccgaggtgcggccgtactatcagtacagagaggagcgggatgacggcggttatcttcatgaactggtcagaacatgccagcgggtgctcgggtcaatagaacattacggtatcattaaaccttatttgcttgaactgtgtgattattattgcgatcttcaggttcataagcatgtcgttgagcatgaacgggttccgaggcttaaagcctggtttgagcagtacaggtcgcagcttccggaaatggagtggtttgaattctcggcctgcgccggatcgacgttaggcattttctgtctcgttgcttactcattccagcctgattttaacgaacataccgctgagaaaatccgcagcagttattttccgtacatacaaggcctgcatatactgcttgattatttaattgaccaggaagaagatctgcttgaaggcgatctgaatttctgtacgtattatcagtctcatgaagaaatgatgcagagactgcagcattttattgaaaaagcggatgaacatttgcaaggcattccgcatgaaaattttcaccggctgatcaacagggggctgctcggcgtctatttatccgatgacaaagtcgccggccaaaaagaaatgggccgcctcgcgcgaaagctgatcagggcaagcggaaaaacgtcatttttcttttatatcaacggaagagcctaccgcaaatttcagaagatggcttggacgaaaagttcgtaatgggtgaactgcgcctctcgtgtacatcatgacggcgcagttttttatttatgatgtgaagaatgaaacattgtgtgcgcctgcagaatatgatactttaattttatgaaaaaattaaagtatttagcggtcatagcattactttccatttccggaggctgctccgtcacccatgcttccgccggctatcatcctgtcttgatagcgcacaggggctcttctgcgattgagccggaacataccgctttgtcttatgcacgtgcgattaaagacaaagcagattatattgagatagacttacgggagacgaaggacggccgtctgattgcaattcacgataaaacggtagaccggacaacagatggtaaagggatgacagatgatctgtctttggctcagattaagaaactgaatgcgggaaaaggagaaaagattttaacattagaagaaatcatacagaaattcggacaaactgccaattactatattgagacaagagaaagcaacggcagcctggtgatggaaaagaaactgattgacatattacaaaaacataagctgatttccggccataaagcagtcattgagtcttttagcgggaagagcttaaagaaagttcgttctatgaataaaaaagttcctcttgttcgattattaaaagataacgaggctgaggagataaatgataagcagctgcaaaccatcagaacgtatgctgatacagtcgggatcaacgccaaattggcaaatgaagcagtcgtgaagcgcattcatcacaataagatgaaagtgcacgtgttttttgataaggaagacgagcatacgctgacgcctattatgctgaaacaaaaagcagatggtgtctttacgaacaatcccgcttatacacgcagcgtgctgcaaaacagtaaataaaaagagacatgcgcattttacgctgtctctttttttaacggtttcttttttgccgcaaggtgcattgcgaatttgccgatcagcccgatgacaaaaaatgcagcaaaccaccagtaataggttttcgcgaactcaaatcctaaatgtcttgataaaatgatgacaaacatcacatagggaacacttgaaaatatgatgcgaagaatattcaaattgccgctcctcccagatgttacacttaaaagatgaacttttttccattatttcatagtaattgatttttcttgaaaagtaaatacaaaaagaatcggcccgcttatgacaggccgattctttatttgccggcagatttcttttcaatcgctataataaacggcgggtcgttttgctggttgagaaagccgtagctcagcacgcgggctttttcctgatcaagattgctgcagtattccagtaatgcacttttttccgtcttgccttcaggatgcccgtggtacacaacgagaacgatcagcccgttctccttcagcagttcaaggagctgttcgatcgcggaaatggttgagtgaccgtttgtcgtaatgcttttatcgccgcctggcagatagccgagattaaagacggcgcaagccacacgaccgtgcgcatcttcaggcagcgatgcctttatttgatcatggcttttatggtgaagcgtgacgcgcgggccgaagtcggcaccgagccgctccttcgttttagcgagtgcgtccgcttgaatatcaaaggcatggacatgtcctgtctcaccgacaaggccggccagaaaatatgtatcatgtccgttgcccatcgtcgcgtcaaccgtgatatcaccttcctgtgcggcggacttcagcaattctttactgaaagggaggatgtgcatcaaggtcatagggcggtctcctccccggtctttctgaagagctttccttgatagcttccccgtgtttccagctctttttgaatggcgcccagtacttcccacttattgacgctccacatcggcccgaccattaattcgattggcccgtctcccgtaatgcggtgaacgatcatttccgggggaatgatttcgagctgatcacatacaagacttacatattcttcttgagaaaggaactccagctttcctttttcatattgcttcaccatcggtgtgccttttaataagtgaagcaggtgaattttaatgccttgcacatccaaatcagcgacggctttggccgtctccatcatcatgtccctgttttcaagcggaagcccgttaatgatatgggaacaaacgcggatgccgtgttttctcagtttattgacaccctcaacatagcagtcaaaatcatgggcgcggttgatcaggagtgcggtccgttcatgcacggtctgcagcccgagttcaacccacaaataggtccgctcattcagttctgccaaatattccacgacatcgtccggcaggcagtccggacgggtcgcgatagacatgccgacaacgccgtcaagcttgaggacggattcaaatttttcacgcagctcctctaccggggcatgcgtattcgtgaacgcctggaaatatgcgatatatttaccgtctttccacttttcgtgcatacggtttttgatatcgtgaaattgcgtgagtaagtcatcggcccggttgccggcaaaatcgccggagcccgccgcgctgcagaatgtgcagccgccgtgtgcaaccgtgccgtcccgattcgggcagtcaaaaccgccgtcaagcgcgactttaaacactttatgcccgaaatgctcccgcagatgataatttaatgtatggtaccgtttttccgtatttgaataaggaaaagggttattctcgttcaatgttcaaaaagcctccctcacatcagatgcatcctaaaattgtagcatgaatgatggggcggaacaatgaaacaattatggaacggtcaaggcgtaatatctacctggtttttctgttgttgttttaatcgttttggagaaatatcactgaacaatgcaaaaataattcctaaaataagaattacactgcctactttgaatgtattattaaaactgtcacttattttttcattatataaatttgaaatttttttctggatagcgataacttccttcttttgagtattgaaacttttttgtaccttttctttatatggatccggggttatagaaagaatttcttcctcttttttgtttaattcagcaatactttttcttcgatcgaaacctttactgtctgaatgctttaagtgagttattatctcgttttttgcatttttatcaaaaacctgattgttttccacaattgttatggcttctttttttgcagaagctgtgtgatcatttatattcattgtaagcacagatgtaagtatggcaatgcctagcgcttgtccaactgtccgcatcatattaagaatacctgaggcaatacctactttctcaggaggaataagccgtatccctgaactcattgccggtcctatcacaagccctaaagctaagccggtcaaacataacagaataactaccgttgttacagaactgtcgtatcgtatgtatccatataaatatgttgtgattgttaaaccgagcatacctagacccgaaagccaaatgcccccgagtttatcagatagctttccagaaagtacagaggtaaacatagatgatagagctaatgtagaaacaattaaccccgcttctaattcagtttttcccattaaattcgtgaggagtaaagtaataataagggtaccgcttgttaatccaaggccctgcataaagagggtgaaagaactgaaactaaacgtacgtatcttcagcatggataagggaatcatcgggtttttaattttagattcaataaagaaaaacaaacagaataataatacagagattacaaaaagagagataattaatggtgatgaccagcctaaatcagatacttttgcaaagccaaaggttaaacagaagagagctccggataaaataagaatccccatgtaatcaatttttttactcactgtttcatcataactctcagtaataaaaaatgctgctaaaaaaagagaaatcaggcctaaaggaatatttatgaagaagatagcttgccaattaaaattttcagttaataatcctccaagtacaggtcctaaagtagctgctaatcctgagaaagccccccagattccaatgatcaatccttttttattttgaggaacgatggccaaagcaataggcattgtaactggcacaatgaaagcagcagataatccctgaatcactctaattgtgataagcatttcaattgaagtgctcaaacaggcaataactgatgtcaaaataaaaagtgctaatccaaacataaaagctttttttcttccaaaatggtctgccagctttgatgcacctactaataaaactgcaaaagctaaagtataacctgtagccacccaagctacttgagaaaggttgctcgaaaagtaatccagcatcttaggtaatgcaatatttactatagtggtgtccattaccgaaatgaatgtacctaataataatgcagataacataattaattttttgaaattcaaaactacaacctccatcagatattaatctaaattaaaattcgatatatatctaaaaacatgataaatgcaatcttaagaggtgtcaatattattcataaattgttttttcatccacttatctcgaaatcatatttttataattcaacaattttgtaacttgaaataactcaataagagcttaaatggacctgtaaactagctgagatgattaaggatttctgaagagtatgacatgaggagaatacttagcatgaggtgaagcaagtctaataaatctaggactgctcatgataatgctcagtcaggtaagtgctaattagaaatgaatattctttgaaagtttccttttgattgataatattaaaaatgtaaaatgtctggcatgaagatagtacaacgttttcctttgtggaaaaagactttatggggtgtgaaaaagtgcggttaataataaatgacagtgtttcagaattctttgacaagatatcctctattctattcttaaaacacgaggaattcttcaaagattatacaaccaaattgggtttgaatttagataatgaatattttgtattattagatgatcttaaaagaataaaagagttagatagtgagtttttaaatttttattttggcagcttttgcgactacaaagatgttaggaatgcaaatattttttgtttagccacaacattttttaaaataccacaaatttacacgaaagatttttttgaaattattgattatttgtctgcagttacagaagaagagataagaaaaaatattttagagtctctaatttatttacaaggagatcttaaaaccgaaacatctacccaacagtatttaaatgatagggaaagtttatttgagctacttaataatctaaatataaagcccgaatacaagtggatcatatttaaggtaatgaaatctcctaaaacttatgtagatcaattttgcaataaattaatgttggtgaatggttatcttaacgaggcgatttataatttaattaaattcagagatgagtggatgaatcaattaaaaaacataaatatagattttccaaaaaagataatcagtacgttaaaaggtaaggaatacttatcttgtaattatattaatatatatccaacacttttaccttgcactgcaactattacgaaaagtgaagataacatttatgttggactgggttataaagttgataaaatatttgaaaatacattagagaaagcagagattaatcatatcattgattttttgaagcttttatcggataaaagtaagttcaagatattaatcttacttagtcataaaaaaatgtatgctaatgagattgctgaacagctaaatttaaccaacgcaacgatttcacatcatatgagaattttgacattgcaaggtttagttgagagtacgagaaatcaaaataaaacatactattatcttaattcttcaaaattcgattcacttttgaacggtttgttgaaaaaatttaaagctgttccagtcttagatggggatgagtaagttttatagttggtgttagtttcgggatgataattaaagctaataaaaacagatctaaaaaatttgatgaatcccgggtgttttacacaaaaaagataatttaatggtgaacaatttaaagcgaaccgaagatcttgtgggtgatgtggaaaaattatgatgtttttaataaaagaagaattaagttatcgttctaaaatgaaggatttttataaagacttcattctgtcttgattaagttttacatttaatcgtattttatgccatctctgtcttgtgaatgaattacctgatatttcttgtgagaattaatttggaataagaaatactattgatatgacattatcaataggaggactgtttaatggcaacaagacaatcagtagatgaacatctccaaagaagcgaacaggcatatgaatttgcgaatgagcaatttatgaccgcttcaaaacaagagcattataatgataatgagtacagtgaagcgcaaatgatgcttgaaaacgcggtgaatgaattaaacaagctgtcattatctgcgaatgatcagcaaagagagcagctttaccgaatgagattgcagctgcagaccttgcaaaacaacatgattttgcagcgtaattttgattactgaccgcgccgtttcaaatggttcagcaaacctgccggaatcccggcgggtttttttgtatttttttaaaaaaagaattgacaataggcctgagtgtgtttattgtattacgtgtactacttgatgtaatacacataaaacactcgaaaaatgaatcgacatataaatgttaagcatagggaaggggaactttcatgaaaaacaaaagatccgtaaaacaagatgtgcctcttattatcgccgcttcggttttggccagcagtctgtttgtcgttcttgtcgtcatcggttttcaatggcagaacatttaaagaaagagagcagctcgtaaaagaaagaagggaagtaaatgattcaaatcgatccgagaagctcaactccgatttatgagcagatcatacagcaattgaaagagctttgtttaaaagggatcatgaagccgggggataaacttccttctgtcagggaattggcaacgatcattatcgccaatccgaacacagtcagcaaagcgtacaaggagctcgaacgcgatggtgtcattgaaacgctgaggggaagaggaacgtatatatcggagaatgcaaaaacgacattggttgaagggaagatgacgatgataaaagagcaattgaaacagctcatcatcgatgcccattacgcgggagttgagctggagaagctgcaggaatggataaaggaaatcagcgctgatgtgaaaggaggaaaggatcatgattgaattgcggaatctctcaaaaacgatagacggtaaagaagtgctcaaggatatttcgctcaccatcggaaaaggggaaattttcgggctgctcgggcggaacggatcagggaaaacaacactgctccggctcattcagcagattctgcttccggatcaagggacggttttatttaatcaggtggaaataaagcgtcatccgaaagtcaaacagaacattatttatatgcctgttgaaaatcctttttatgacaagtatacatataaacagcttgttgcgattgtaagcagaatctatccgaattttgatgtgacttacgccaatgagctgatgaacaggtacggcattccggaaacgaagaaataccgtgaattatccacaggcctgaaaaaacagcttgcgctcgtccttgcctttgcttcacgcccggctcttatccttttggatgaaccgacggacggaattgacgccgtaacgcgtcatgacgtgctgcagcttatggtggatgaagtagctgaacgggaaacgagcattctgattacctcacaccgtttagaagatattgagcgaatgtgcaaccggatcgggtttttggaaggaaatcagctgacgaatgtgatggacttggatgatatgaaggaagagtacatgaaaatccaaatggcatttgaagaggacgtcgccttgaagatcagagaacaaaatataccgattctcgaccatgccggtgtgttttatacggtgctgattcaaaagaacgatgagaagaaaaagaactttctgcaagagctgcagccgaaagtatggaacgaacttcctgtgaacttagaagaagttttcatcgcgaagtttggaggggaccggagatggtagacaggggattgctgtacagggaatgggtgcagaatcgaactgttcttgtgatggtcggcatttttttagcggcggtcaatccatttgaagtgttaaatacctatctggtttatcaaggctgtctggacacccacgaagcatattgtaagttttatgtgaattctttggatagcggaatgctgaacttaaactgggcgcccgctgtgattttggcggtttgcttattcggactggaacgtacgaaaggaacgattgatgcgcttttcagtctgccttattcccgcgctcaggtgtttcacactaaattttggctcggagcggcggtcattaccggcgctcaggtgatcggctacgggctggctgagctgctcattcttctgttaaagcctgagcgcgtatatttcttccaccattacagcgtcggagagattattgtgagtgttttggcttttacattggtcgcgagcgcaggctgcttaacggggaatacgttcgcccagctgttaacggcgtttgccgtgtcgatagcgccttacctgattattacgttgccgctgacaaatgcggaagttatcttcagggtcggcatgcatgagctgatgccatcagtcaatgcttacctaaacgattcgtttcaatatctgattccgatcatgtatgttaatacggactgggtatctgccagcaagtatatattaatcattccggcagtgatgagcattgtattttatgccatcgggtacttttgctatgtcaggcagccggtggaacggaacggccgtttttttctttggagacagcttgaccggcccattcagattgtggtgatcatcatcgccgttctcggttttggcctggcggggtactcgacgggacatacgatgacagggtatgtggccgggatgctggtcggaggagcgatcggatttttggtcagttattttgtgatttataaaaaaacgaagcatgtgtaagagaggaggaccggaatgataccgcggggattgttgtacacagaatggaaaaaaaatcagtggttgtttttatgcagcggcattcttttaatggcggcaaacccttttatggtttataacaactactcaacatatcaagaatgtttgaataacccagctcttcaagattgtgaattcgttgtcaattatacgaatgggtcgcctctttccttcagctgggttgtgagtgtcatcattgctgtcttcttattaggcttggaacggacaaagggaacgatggatgctttgttaagcatgccttacagcagaggccaaatctttcagacgaaattctggctcggcggggcagtcattgttgctcctcaggcgataggctatggagcggcgtcattgctgatatctttgttgaaaccgagccatacgtacgattttgatcatttttcaatcggaatgattgtcatcagctttatggcttacgccttgttaatggcatccggagcaataacgggacatatattcgcccagctgttaacggcgtttacagtaacggttctgccctttttactcatcggtctgccggccgcgaatttggaggtcgttttcgattttagtgtcggagatcaattttcttttatcagcagttatatcgaatcccgtctttttatatttataacccctattggatatgtgtttaacgactggatcagagaaagagatttgattttaatcattccgattgtgatgagccttgtcttttatctgatcggttacgtcagctttctgaaacatccgaatgaacggaacggcagattctttctttggagaaaattggaccggccggtgcagatcttggtgattgcgtttgccgttatgggtttcggcgttttcggatatggggtcacagacacgatgttcggctatttagccggcattatcttcggcgcggttatcgggtttttcatcagttattttacggtttacagacagtcaaagcatatgtagatccgtttgaaaatgagcagtttggaggaaggcaaggtgccgattagcggtttgctttataaagaatgtaagcagcggcagacgctgctgctgcttacagcggggttcttatctatcttaggccctttggcaattataaatgagtattttcactataaggattgtttacgtgcacttcagctgtacccggggtcagtttgtacattcagcatcgattacagcaattatcggaatttgattgggcttcatttcattccgccggttgttatggggctttttctgataagagcaggccgggctgaaaggatgtttacactgagtcttccgtattcgagaagccggatatttcatacgaagtttttcttgggagcagccgtgttagccggctcgcagtttgtttcttacggagtatccgacatattgttcctagcgcttaaacctgacgctgtccatcattttcaatcattcagcgcagggatgctggtcatcagcttgatgatttacgcattagtgacagctgccggcacgataacgggcaatttagcggcgcagctgatcacagcgttcacggtttccgtctttccgatcgtggttatgacgatttatctgttaaacgccgagttcctttttggcaggcaggctgtgccggatattgatttcccttggagcggatttctgatctatttcatgcctgccgcttacatccatacatcatggatgtattacatgaaacacgcattgttcatctccgcattaatgggattttgtttctatctattcggctatgtgaatttcctgaaaatgccgaatgaacgaagcggacattttatcctgagcaaacacattgaacgcatcattcaagtgctcgtcatgtcgctcagtatgctgggaagtgcgggggtatgcggatatgcttataacggttcgtataccggttacatattcggcatgctcatcggtgcgattatcgggtttttcatcagttattacttcatctataaaaaaacgaaacagatataagggggagtggtgtacgtgatagaggtacagcatatcgatcattcatttaaaatcggcaggaaaggcagagagagtgaggttccggtactgaaggatgtctctttgaccgttgaaaaaggggaaattgcctgtatcgtcgggcggagcggttccggaaaatcaacgcttctgaatttaatttcgggatacatagcgccgacaaagggccgtatcgtcattaacggcactgatgtgacgggtttcaatgaaaaagagtgggcgcagttccgcctcgggcatttcggctttatttttcaaagctttcagctcatcccgagtctgacaacctatgaaaatgttgaaatgccgcttgccttaaaaggtgtcaaaccgtctgaacgcaagcagaaagtcgcggatatgctgaaacgggtcggacttgaaaatcatgcgaatcattatccgaatgagctgtcaggcggccagcagcagcgtgtcagtatcgcaagagccctcattttaaatccgtcaattattttagccgatgagccgacgggaagcctcgattcagaaacggaacttgaggtgcttgcattaattcagcagctgaaccgggagcgcgggattacatttgtcatcattacgcatgacgatgaagtcgcttcgatcgcgcattcaaaattccagctgcatgacggtgtattaaaagggggcgttactgttgagatttaaggatcagattcactttatcagaagaaatatgaagaaaaaccggctgcgtgttttcatgacggtgctggcgacgacaatggcgtgcgcgtttttagtggtgctggcttccgtcggattcggcatccaaaaaacgattacagacattacgatgagccagcagattgttacggaaatcaatgtgctcggccaagagaacggaaaagccgtgaagaaatcagacttggaaaagtataaaaatgtcaagtctgtcgttgagagaacacaagtgtatgaaccgaacaaagcgtcattgggaaaccgaacaaatgaagattcagccattgtgctgacaaacatgaaagatgaagtcaaagccaatatggagcttgatcagggaagagtcgcccgtacagagaatgaaatcgtggtcggctatgattttgcgaagaacctattgacgaaaaaagaggctgacgcttacgacaaagagttaaaggatcaccaaggcgacatgtcggaggtgaaaaaaccaaaaggctatacgaaagacctgcttaataaaacgatacagctgagcatctccaaaacaaacaaagacggagacgttgaaaaaacgaaaacgtacgacttcaaagtagtcggaattacaaaaaaaccgtcccaagattggatggaggatacaaatatttttgtgagtgatcaattcaagaaagacttctcgacattcttggatctgaagaatggaaatgcggaaaaaagcatcaatgtgtatgcggacaaattcgatcatgtcgatcagcttacccatgacctcacggatgacggcttttatgtcagatctgtcacaaccgagctgaagggcgtcaacacctttttcctcgtctttaaaatcggtctgatctttgtcggctttatcgccgtcgtgatttcagccatcggtattttcaatacgatgacgatggcggtgacggaacgaacgcaggaaatcgggattatgaaagcgatcggcgcaagcccgtccatcatccgcagaatgttcctgatggaaagcgcctatatcgggatattaggttctgtcatcgggattatcatttcttacggagtgagttttgccgtcaatctggctgtgccggttattttgaaagcggtagggggaaataccggagctgaagatcttcattataccttctcctacatcccgctcagcctcgttgtgatcgcagttgtcatttgtgcgggggtcgcggtgatttccggtatgaatccggcccgcaaagcgacaaaaaccaacgttctgaccgcattaagaagagaactgtaaaggaaaaaagccggctggacatcagccggtttttcctctatctatcagaaaagggcggataccatgtttcacattttgttaatagaagatgataacactttgtttcacgagatgaaggagagattaacgggctggtcatttgcggtgcacggaataaaggatttcagccgggtcatccgggagtttactgaaattaagcctgatttggtgatcattgatgtacagctgccgaaatttgacggctttcattggtgcagaatgatacgctcccaatcaaacgtgccgattctctttttgtcctcgcgcgatcatcccgcggatatggtcatgtcgatgcagctcggggcagatgattttattcagaagccttttcactttgatgtgttaatcgcgaaaatacaggcggtgttccgccgtgtgcaccaatacggcacagaaccggcgctgatgaaaagatggtgcggggcggtcattgacacagaaaccaacacggtcagctgtaaaaacggttcggtcgaactgaccaaaaacgaaatgctgatcttaaaactgctggctgagcagaaaaataaaatcgtcagccgggaagaactcatcagaagcctatggaatgatgagcgtttcgtcagtgataatacgctgacggtgaatgtcaaccggctgcggaaaaaactcgatcaattaggcatcgggaaaatgattgaaaccaaggtggggcagggatacatcgcaaaggaagaagacggtctttatgattaaatcatttctgctcgaaagaaaaagctggatcgcgatgtttcttttgcagcaggctgtgctcctttttgcggcatatattgatgcgtctattccgtttttttcggtgctgtattttgtttacctgtcgcttcttgtgtttcttgtatttctcttgttccgctatcgtaaagagaccgcctattataaaagcttaagagagtgggacgccaatttagacatgtcttatcttaaagcgcctgacagtccgtttgagtctatcgttgaagaaagcattgaagggcagacagagcaattacgaaaaagctcacttgatcttcaggcggcgtcagagcatgaaaaggatgatctgatgtcatggattcacgaggtcaaaacaccgctgacagcgatgcatctcatgatcgagcgccttgatgaacagccgctgaaagcccctttgctgtatgaatggctgcggattcaccatctcctggaccagcagcttcatcagaaacgattgtcctttattgaaaatgatttatcattccagcgcattcagctcagaccgctcgttttcaaagaaattaaaaacctgcaatcatggtgcatacaaaaagggatcgggtttgacattcagcttgattcaccggacgttcacagtgacggaaaatggctttccttcatcatcaggcagctgttaagcaatgccgtcaaatacagtgaagcggatgacattaccgtaaaaagctatgaacaaaacggccgggtgcatgtcgatatcgaagaccgcggcatcggcatcgagcccaaagatcttccgcgcatttttgaaaaaggatttacctcgacgcgaatgaggcgagatcacgcgtcaacggggatgggcctgtatttggctcgaaaagccgcggctccgcttctcatccagatcagcgtgcgctctgagccggaaagcggcacgatttttaccttggtgtttccaaaacagaacgatgccgtcagcatgttcagcgtgtgacaaaagtgtcacatgcttttctcttttgttcgcttaatcaaacgaaaaaaacggcttctgtttttaaaataaagataaccaatgtaaaaggagaatcataacgtgatgattttagaagcaggcaatatccaaaaaagctacggaaacaagctgaataaacaagaggtgctgaaaggaattgatcttcagattcacaaaggggaattcgtcagcattatgggcccgtcaggatcagggaaaacgacccttttgaatgtgctttcctccattgataaagtgagctcgggcaccattaaactgaacgagacggagattacatccatgaaagaaaaacagcttgccgaattcagaaaacggcatctcggctttatttttcaggattataatttattggacacgctgaccgtgaaggaaaacatactcctgccgttatccattacgaaaatgtctaagaaagaggcggacctgcgatttgccgagacggcagaggagcttgggatctatgatttgagacataagtatccgagtgaaatttccggcggacaaaaacagcggacgtctgccgcaagagctgttattcacgagccgggcattatttttgctgatgagccgaccggagcgctcgattcaaaggctgccacggatttattgaataaactcagccgcctgaatcaaaaacgccgcgccaccattgtgatggtgacgcatgatccggttgccgccagctattccggacgtgtggttttcattaaagacggccgtgtgtatacgcagctgaataaaggcggtcaggacagaccggacttttttcaggatattatgaaaacgcaaagtgtattgggcggggttcaggcatgagtattcatcatttgatcttccagaacctgaaaaagaatatgaaaaactattatctttacgtttttgcgctggtgttcagcgccgccctttatttcgcgtttgtcacgatgcaatacgatccggcgcttgatgaaatgaaaagctccataaaaggagcggcggcaatccgggccgcctctgtactgcttgtggcgatcgtgtcggtatttcttttatatgccaacaccatttttattaaacggcgcggccgggaaatcggcttattccgattaatcgggatgacgaaaatgcacattttccgcatactcagcgcagaaaatttcattttgtatttcggatcgatttggatcggtattttcgccggcttttccctctcgaaattatgtatgatgatgctgtttcatacagtcggtgtgaaagcctctgtctcactgtttttttcaagcaaggcgctcgttcagacgttaattgtgttcggggcaatttacgtgctgattatgatgatgaattacttatttattaaacggcaaagcattttgtctttatttaaaaccgcgtcatcgtcagaaagcggcataagacggctttcttgggtgcagatgttgatcggcgttgtcggtattgcggccattatcgccggctatgccgtgtccgcggatttattcggaggcagttttacgagcatgaatgaactgttttcggccatggtgtttattctcggctcggtcattatcggaacctatctgttttataaaggttcggtcagctttctggcaaatctcatccggaaatcaaaaggcgggtatctgaatgtcagtgaagtgctgtctttgtcatccatcatgttccggatgaagtcaaacgccgtattgctgacgattattacgactctttcggcgctggcaatcggtttgctgtctttaagctatatctcgtactactccgcggaaaaatcggctgagcaaaatacagccgcggactttgcgtttgataaccaaaaggagactgactcttttaccgctttattgaagaaaaacggaattgaacacaaagtaaaaacaatcaagaccattcaagccggtgtcaatatgaagaacattataaacggcgacatgaaaagctttcaacaagacccgtccagcctggcgctgccgattataagcgagaaagacgcagaagggacggagctttctgacggagaagccgtgtttaccggatataatgatatgatgaaaagatttctcgacctgaaaacgtcgggttccattgatataaacggcaaaacggataaaataccgctggcgtataagggcttgaagaacgacttcctcctgtcatatacatttacaagcggagggctgccgaccgttatcgtcacgcagcaggtattcgaccggatcgagaaagatatcgacccgtccatccagggaaaatcaaatcggtttttcggcattacactcaaacgagaagaggacatccaaaaagctgatggtctgtttcaggcgcagcactattcagacggtgcgctttcacaatttgaaacggctgacacgcaaaagaaaaacatggggctgatcatgtttattgtcgggtttttaggattaacctttctgatcacctcaggctgtatcctttattttaaacaaatgggcgagtgtgaggatgagaaggctgattatacgatattgcggaagctcggcttcacaacgggagatctgctgaaaggcatccgccggaagcaggcgtatcatttcggcattccgctcgttctcgggctgttccacagctattttgccgttcagtcaggatggtttttattcggaacggaagtgtggacgccgatgatcatcgtcatggcgctgtatacgctgctgtactccatcttcggcatgctgtcggtgctgtattataaaaaggtcattcaatccgccttgtaaaacaagttgaggagcctccgcataagcggaggctttttttgtatgaatagaagaaagcgatttttaaaagaatagacatacgtcattttttcgcgcgggggagccttatgcagaagtattttcaattgaaatctgaaacaggggcctttcatcttttttccaaggaacacattttcacattgttgatcatcgggttgctgggggcgggcgtgatcgtattccggaaaaagctcaaccagagccgcatgatccgctatgtactattcattctccttgccgtgtcgcagatcagctatcatatatggctgctttgtcatcatgcctggtcgctgaaaacagctctgccgctgcagctgagcgacctttccgtctatttggcgatgctgatggtcatgacaaaaagcaaaaagctattcgccttcctctattttgccggtttgggcagcgccgtacaggcgatggcaacacctgatttaggggcgtattctttcccgcattttcggtacatcgtgtttttcgtctcccacggctgtgtttttcttacctgtctattcatggccgcttcagaaaggtacaggccgtcggcgcgcgggctgtgggtgtcggtgctgatcgtaaatctgtacggggcgtgtgtcttttttattgatcgtgtgctgaatgcaaattatctatatttaatgaaaaaaccgaagaccgcttcgcttctgaatgttttcggaccttggccgtggtatcttctatcaatggaagcggcggtgatattgagcttcttcattctgtatattccgttttggctgctgaggaaaagagcatgaagccgggctgtttttgcgaatccaatcatttgtaattttttcaacattccggcattatttttttcagattctgatgttgaaaaaagacgtccgcggcgatagaatgaatgtgctatgataacgtgatcgatacggagccgcggcttgcggtttccgttttttcatggggttttttatagagagagggggatcggtatgccgcgcgctttgaagatattaatcatcggaatgtttatcaatgtgacgggcgcatcttttttgtggccgctgaatacgatctatattcataatcatttagggaaatcgctgactgttgcggggattgttctgatgctgaattccggggccagtgtggcggggaatttatgcggcggatttttgtttgataaaatcggcggattcaaatccattatgctgggcattatgatcacattggcaagtcttctcggactcgttctgtttcaccaatggcccgtttatatttggctgctcatcattgtcggcttcggttccggtatcgtgtttccggccagttacgccatggcgggagcggtatggaaagaaggcgggcggagagcttttaatgcgatttatgtagctcagaacgcaggtgtcgccgtgggctcggcactcggcgggatggttgcggcgtactcgtttacgtacgtgtttttagccaatgctttgctgtatgtgctgtttttccttatcgtatttttcgggtttcgaaatatcaaaaccggaaatgcgagccaggtttctgttctggactacgagcctgtcagcagcagaacgaaatttacggcgcttctcatattgagcggcgggtatgttctcgggtggattgcctattcgcagtggtccacaaccgttgcgtcacatactcaaagcatcggtatgccgctttcattatacagtgtgctctggaccgtaaacggaatattaattgtcgccggacagcctctcataggagctgttctgaaaaaatggtcaggcgcgttaaaaacgcagatggtcatcggcttttgtatttttatcgtttcgttcggcgtgcttcttagcgccaagcaatttccgatgtacctcaccgcaatggtgattttaaccgtcggagaaatgcttgtctggcctgccgttcctaccattgccaatcagcttgcgcctaaggggaaagaagggttttaccaaggattcgtcaacagtgcggcgacgggcggcagaatgatcgggccgctccttggcggcgtgctggttgatcagtacggcatgagcgtgctgctgttgatcctgatggtgcttcttgttgtcagcatcgcagcgacggtgctgtacgacaaacgcctgaaaaccgttaataaacaaaacatccaagtgcgatgacgacataaaaaatcccgccgaaacagcgggatttttttgtttatacgaccggaagcacgttgacggcgtccttaacgtttaaatacgtctttaatgaagaaaagctggcatcaagctgattcattctcatggcgagggaaggcttgatcccggtgataatcagttctgtgccgattaatttaagcaggtggtgcaatttgaaaatctggtctgccgtctgttcgtttacctcggccaaacctgataagtctataattaagtaatcatctttagatgcggttaatatgtccgtcaaagttgtcacaattgaatcaaatcgttcttccgttaagtttcccactaacggcaaggcggagatgccgtttcggatcggaacaatcggtgttgacagcgtcgtgatttctgtgagggaatcctccaggagcttttcgtattctttctgctctgtaatgtctttttgaaaaccgacaaaatagagcttgtcttcaacatacagaggatcaatgttgagttcattccaaaacggggtgccgtcttttttgacatttttcagccgcaccgtgatcttttctttctggtttaagctctttcttattttcgcgacttgttgacggtcggtttctttgctttgcagaaatctgcagttcttacctaatatctcttcggaagcgtagcctgtcatatccataaatccctgatttgtatatatgatgggattgtcctcaagagaggggtctgtaatcaccacgccgatgcgtgcgtgatcaagcgcctttttgataagctccagctgctccagttttccggatacatttgagtcagccatgtaaaacccccttttggccgtaaagctgcgcgcttttttcagccgttgtttctcccctttttaaatgaatctacagtaaccgtagcataacatatgttctgattcaagcagccgaagtttgcaatttgtcattcgggcttgtcctcatatacactgaatatataaggggaaggcacatcatcgctaagtaagtgactaggtcattgtcactgggtgaaaaatgaatctaatgcatcaagcttaccgatcatgtgttcacatataatggaagaaacaagctttttactttcctgctcaatcgccggtatgtagatatcgaaaatcatcgtattcgtaagggggctggatggcctgaagtcgctttactaaataagggctttaggaaggtgatgaagatgctgcatcaggtaataattgcttgtgtaattggaggcatcatgggggttctcggtcatgtgaaaaagagaggcaggctggagaaacccagaatgacaaagcggtttatctatctcggttttttggaagatggttttatcggaatggctgcttccatcttacttgtcttatccgctgaccccgattcaggaattcaactcgtcatcttatccataatcgcaggctacggcggagaagctgttctcaggagctttgattttgtcagagaacaaaacagtgattcggccgaagcaaaaccacaccagcaaaaaaatcctccatcaaaataatatccccgctcacgacccgttccgggtacattcccattgtatacaaacctgcttgcacttatgaacagaattctataaaatacaggtaagattacggtagcgataagaacagtgaagaggagcagtaagaagcagatttcgcactcagagaattgacggccggtgcaagtcaatcaagtctgtttccgaactcgcctcagagttgcagcggcaaaaccgctgacgcataactgcgttaaaagtatcaagtgagtgcggcttaaaaccgcgctaacgagggtggtaccgcgggaaacaaaaatctctcgtcccttttagggatgagggagttttttttagttttagaataatctgaatataatcttcctcatcccgtcaatacttggactacatacgccgtattcaatcagaaggaggtttttacgttgagttttcagcacgaaaaaatagaaaagaaatggcagaattactggttggatcataaaacgttcgccgtcagtgaagagaatgacaagccgaagttttacgcgcttgacatgtttccgtatccttcaggagccggccttcatgtcggacatccggaaggctatacggcaaccgatatcctttctcgcatgagacgcatgcaagggtacaatgtgcttcatccgatgggatgggacgcgttcgggcttcctgccgagcaatacgcgcttgacacgggaaatgatccggctgagttcacaaaacaaaatatagataatttccgccgccagatccaatcactcggattttcttatgattgggatcgtgaaatcaatacgactgatccggactattacaagtggacgcagtggatcttcaccaagctgtacgaaaaagggctcgcatacgtagacgaagtgccggtcaactggtgcccggcgctcggaacggtgcttgcgaacgaagaagtcattgacggcaaaagcgagcggggcggccatccggttgaacgccgcccgatgagacaatggatgctgaaaatcaccgcttatgcggacaggcttcttgaagatttagaagaacttgactggccggaaagcattaaagacatgcaacgcaactggatcggacgctcagaaggcgcaaacgtgcatttcgcgatcgacggcactgatgacacgtttacggtgtttacgacaagaccggacacgctgttcggcgcggcttatgccgtactggctcctgagcatgagcttgtggaggccatcacgacgcctgaacaaaaagaagcggtagacgcttatgttaaagaagttcaggcgaaaagtgacctggaacggacggatcttgcgaaaacaaaaacgggcgtcttcacaggtgcatatgccgtaaaccctgcaaacggggaaaagctgccgatctggatagcggattatgtcctcgcctcttacggaacgggcgctgtaatggccgtgccggcgcatgacgaacgtgattttgaattcgccaaagtgttcagcctgcctgtcaaagaagtcgtaaaaggcggaaacacggaagaagaagcgtacacgggagacggagaacatgtcaattccggctttctgaacggactgaataaagcggaagcgattgaaaaaatgatcgcctggcttgaagaaacgaaaaacggtgagaagaaagtgacataccgtctgcgtgactggctgttcagccgccagcgctattggggcgagccgattccggtcattcattgggaagacggtacgtcaacagccgttccggcggaagagctgccgctgattctgccgaaaaccgatgagatcaaaccgagcggaacaggtgaatcaccgcttgccaacattaaagagtgggtggaagtcactgatcctgaaacgggtagaaaaggcagaagagaaacgaacacgatgccgcaatgggcgggaagctgctggtatttcctccgctttatcgacccgaaaaatccggatcagctcgcttcacctgagaaactggataaatggctgcccgttgatatttacatcggaggggcggagcatgccgtgcttcaccttctgtacgctcgtttctggcataaattcctctatgatatcggtgtcgtgccgacgaaagaaccgttccaaaagctgtataaccaagggatgattctcggggaaaacaatgaaaaaatgagtaaatcccgcggaaacgtcgtcaatccggatgaaattgtggcgtctcacggagcagatacgcttcgcctgtacgaaatgtttatggggccgcttgacgcatctatcgcctggtctgaatcaggccttgacggagcacgccgcttccttgaccgcgtatggcgtttgtttatcgaggaaaacggcgagctgacgggcaaagtgacagaaggcgcgggcgaaactcttgagcgcgtctatcatgaaacggtcatgaaagtgacagaaaacttcgaagcccttcgttttaacacgggcatttctcagctgatggtgttcattaatgaagcttacaaagcgaatgaactgccgagagaatatatcgaaggttttgtgaagctgctttctcctgttgcgccgcatttggcggaagaactgtgggaaaaactcggccacgaaggttcgattgcatacgaggcttggcctgcttatgacgaatcaaaactggtggacgatgaagtggaaatcgtcgtccagctgaacggaaaagtaaaagcgaaattaatggttccggctgatgctgataaagcagcgttagaacagctcgcacaagctgacgaaaaagtaaaagagcagcttgaaggaaaaacgatccgaaaaattattgccgtaccgggcaagcttgtcaatatcgtggcaaactgaccggacgaagcccctctcctacagagaggggcttttttatcaggcctctatcatagaaattgcaccgcgggctttggtatacttaacaccataaagatgaatgggagtgtcacacattgaaaataaatgaaatcagcacagccgcactggaagaaaaattaaaagcgggagaagagctgtatctgattgatgtcagagaagacgaagaagttgccgaaggaatgattccggaggccgttcatatccgcatgggggacatccctgagaagatggatgcgttagacaaggacaaggaatatgtatttatctgccgttccggaaaaagaagcatgaacgtttgtatgtatttacatgagcagggcttccgtacagttaatgttgaaggcggcatgctggagtgggaaggcgaaacaaagccgaagaaataacgctttgaagtgaaagaagaaaagggacgtgcgtctttttcttctttttttataaaaaaaacgggaggcgaatcaggtgaaaccgatgatccgcgcgatgaaaacaaacgatatcaaacaggtccggcaagtcgcagaacgcagctggcatcatacgtatgaagggattattcccagacacattcaggatcagtttctcgaatccgcctatcaggatgagatgatggaacgccggctcttgcattctttgttctttgtggcggaagaagaggggcgagtgctcggttttgcaaatgccaccccggttcaaaaagacggaaatgcggagctgaccgccatctatattgatccggattgccagggaagcgggataggcacggcacttcttaaagaatgcatcaggcagtccggcggggtaaaaaagctttatgtccatgcagaaaaagagaaccgcatcgccttgtccttttatcaagcgaaagggtttcaaagggtatgtgaatttgaagaagattttaaaggacacaccttacagacggtcaaactggtgctgaacatataaaaacgtccggcccgcccgggaccggatcgcgaatgatcagtgataagccggaagccggtctttgtgcgcttcaaataagtcatcgcacaaagagatgatgtcattcatggaaagctcggcgctcgtatgcggatcaagcatggccgcttgatatacggcttccttttttaatgtaacggccgcttcgatggttaaaagctgtgtgttgatgtttgttctgttgagcgccgcgagctgctccggaagttcgccggaatagcacggcataatttggtttttaacggcggcgcacggcacttcaacgaccgctttcgccggcagattcggtatcagcccggtattcagcacattgccgccgaatgtgaacggacggcccgtctccatcgcttctataattctcgaaccgtattctttcgagcgttcatgcgtcaggttttggttgttgatgatcccgtctctcatcgtttcccagtttttgatttgttccgcgcatctcctcggatattcatcaagcggaatttggagttcatctatcagctccggataccggctttttataaaatacgggtgatattcggcattatgctcagatgattccgtcacgtagcagccgaatttatccatcagctcaaaccgcaccatgtccttatgtttcgtcttttgtttttcgcgtgcccgtcttttaatttccggatataaatcaattccgtcttttttaatctccaaaagccaagccatatggttgatgccggcaatgcgttcttccgtaccttcgtgatccatgccgagtgagtcgaacagatctttggtacagacctggacgctgtggcacaggccgaccgttttgacatttgtatgtctgagcatcgctccggtcagagaggccatcggatttgtatagtttaacagccacgcatccgggcagacctcttccatgtcttttgcgatgtcaaataaaacggggatggtgcgaagggaacggaaaatgccgcctattccgacggtatcggcaatcgtctggcggagaccgtaccgcttcgggatgtcaaagtcaatgaccgtcgcgggtttatagcctccgacctgaatggcgtttatcacatagccggcgtgtgtaagcgcttgttttcggtcatcgtaggagatgatggatatactcggattgtagcggtctctcatgttttccagcatgagctgagattctttcagccgtacagcgtcaatatcataaagcgcgaattcaaatccgtttaatgcttcagtcagtaaacagtcccccagtacattttttgcgaaaatcgtgctccccgctccgataaacgtaattttcttcaacagaaattcctcccttttcttctcagcctttgaccgccccggaggacagccctgagataaaatatttttgaagtgccaaaaacaatacgaccatcggcagcatcgccataattgcggctgcggcgactaagtgaagattgttcgcgttttcgccgaagaaccccgccatggccacggtcaatgtctgcaccttttgatcttgtaaaaagaaaatcgcaaattggtaatcgttccagataaacacgcaggaaataatgcagaccgttgcggtaatcggtttcaacaaaggaaacacgattgtataaaaagtcctgatcaatcccgcgccgtccatcctggcggcttcctcaagttctttcggaatggaagagcggataaaccctgaatataagaaaacggtcagcggcatatatgcagccgtattaatgagaatggctgcggcatgcgtattgaccagccccgcatcagcgaccatcttgtataaaggaaccatggaagtcaaaggcgggataatcatgatggaaatcaaaaggccgaagacgattttgttcagctttgtatttcttctagcgagcgggtatgcggcaagcgaacccatgaaaattagcaaggcggcggaaacggctgtaataatgatcgtgttcagaaaggattgcccgagagaggcacgctcccatgcttcacgaaaattctgaaatgaaaaggcggatggcagcgaccattttgaactgtagtctccttttgcttttaatgacgtggtcagcaaaatataaaaggggacaaaatgaacgcacgagataacggcagccaacagcgtaaaaatccgcattcgggctgttttcatgacatttccgtctcctttcgcttgaaatacacgagagccgaaaagctgatgacaagaataataacggacataaacacgccttgggcggcggcatatcccgcatcctgccgtttaaaatataaatcatacataaacgtcgacatcgattgagaggaattgcccggcccgcctgcggtcagagcgaaaatgacatcaaacagcttcagcccgccgatgatattgatgaccatgttgatggtgacagccggcatcaataatggcagggtgatggtgaaaaacggctgaagacctcccgcgccatccatttttgcagcttcataataatctttcggaatgctttgcagccccgccaaatatacaatcatcgcaatgcctgcgtattgatacgtgttaatcatgacgataatccacgggtttgccgcagggcttgccaaggcgttgacaggaccgattcccagtgcgcccagtacatcattcagcgcacccccgtcatatgagaaaataaaataccaaatgtatcccataatcagcggactgataatgacgggcaggtagacgatcgttcttgtgagcgccttcatttttaagctctgattcaaaagcagcgcatataaaagtccgagcatattctgaaaaaaagtgcttccgatgccgtaaagcaaagtgtttttcacaataagccacgtgtccggatctgtaaaaagccttttatattgagtgacccccacccattgatacgtctgtgagaagccgttccagtttgtgaatgtgataaaagcgcctttgacaaacggaaaaatcatgaaaataaaaaccgtggcaagagcgggaacgtacatccaccacagtgacgcgggttttaccggcttttgatgctgaaatccttgggtttctcttgcaagatcactcattctttgtcagctccttgtgaatcagattgaagacggagccgcttatattccctgccgagtttcgccgaaacttccgcgggggttaagatatcggccgtcagctcctgcccggctgtccccatcacatcccacattccgttcggcaaataaaggcggtcaaaataaggctgcaccttaatatgctgatagcgcttatagtcatttgcgtagaaaatgtccgtttgcacattcactaatccggccggaagcgaggtcgcttcggcaattgatttcgcatgctcgggacgggccataaatgcgatgaactgtttcgcttcttcaagccgcggggaatccttgaatgccgccagcgtgtaacgttcgcctccgatccaaaccggcgcgtctcccttgtggacggccggggtcggtatgatgccgacttttaccttcggattgatttgagcgacgtcttggccgagggtgccgccctgcagcgtaaaggcgattttgttttgcgccatcagttcaatgagctgggaccgttttgccgtcacggcatctatattgagcaggctttccttttgcatctctttcagtttgtcagataaataggtgaagtgtgtccagcggaaggttccgtttaacagctgttttttgtaacggtgtgcgggatctgtgatgagaagcggtgcggcgaattgatcgtaatattgggcaaatgagcttttctcatagccggcaaaccagaagggggtgactgttccgccgcttttttctttaatctgtctcagtgccttcataaaatcatccattgtttccggcggtttgattctgtatttttccaacattgtgcggttgtaggccagtccgtcctttgcctgattcagagggaaggcgtatattctgcctttggcgtctttgagcatgctgtttaaattcggatcgagccgcttcgtccaagacatgccgctgaggtcggcggtatattctccgtagcggattttagcccagccgtgtgtgtcgaaaagatcgggcatgtcaccggctgccattctgaccctcatcatattttcgtagtcattgcctgggaaatgaacgtttacttgaatgtccggatgttctttttggaatgaatcagccaactttctgaatacggcgcgttcgctgtctgaggatattgtggaatagactgtcaatgttttctgcttttctccggcgccgctctgttctgccgagcagccgggtagtatcatgcaagtaaaagaaagaaacaaagccagtaagcgtttcatcttttcctcctttaaatatgatataaacgctgcgggacatgtcacctcctttcttgtgagccgcagctttgtctgacaatcaatgaagtggggagcgtcacggccagcgggacggttctgccgtttaaacggtcgagaagcaatttgacacccgtccggcccatctcttccgtgtatacttttaccgttgataacggcgtgctggcgtattctgcctcatcaattccgttgaagctgacaattgccgtatcgcgcgggacttgaaggccggcttcctgcaaggcttttaaagcgccgacagccatcgaatcacttgcgataaaaaaggcatcggggagacttccgcctttgatggcttcattcatcagccggaacccttcgtgcatgctgtattcgccgatcagtacatgctccggcccggctccggccatttgtaagaaagcggtcagacgcttatcctcaatcgttttattgctgtttacaccgtctatgacggtatgctcccgttcccggccgccgatataaccgagccgctggtaaccgagcgacagaagatgttcgatcgccttttgcgctgcggcataaaaatccacgctgacagaatcgtagcgggcgggatcgggggtgccgttaacaaataccgcgtgcctgaaagcggcgctgatattcgtaagcgcctcgtcttgcaggctgccgattacgatcacgccgtccagatcgtgaaacatatgctcttgaaaagacccgagatggatagaagatgtgataaaaactttttgccgaaagcattcttcctcaatgccttttcggatcgctgaaaaataaggatcctgccgttcttcttccggtgacaggcagctgacaacgccgatcaggggggctgaatcgctgcggctgcggttcttccgtttttttgccgacggctgatagcccagctcatcggcgatcctcagaactttttctcttgtttcatcagtcacggccaaagagtcatccttattcaaaattctcgatactgtcgcgctggatacagatgcctgtaaggcaatatctttgagacggaccatttcgtatctcctttttactaaatatttactaaacagaaatgacctggttattgttaaaatgatattatcatatattagtaagcgttttcaataactatttttggttacttttagtaaaaatcagtaaaaaagaaaatctgtttttctctatcatatttcaattgaaccggaataaattgatagagaaaggagagggtgatgtgctgaagatagctgtttttgatgaggagcatgaaaaggatctgcagactgaagtcaatacatttttaaaggggatttctgatgaacagctcgttgatattaaatatacggtagcggcggcctgtgatcctgaaggtgagcagctttattgtttttccgctctcattttataccgaaaataaaaaagcccggatgaaataccgggcttttttatgcattatgcttttttgacgcggggacttctcggtttttggtatttctccgcttgtttgattccttttctttcgctcgctaatgacttgtacagagacacgatcatcagaaggatcacgactgaaaacggaaccgcggcgagaatggccgtgttttgcagtgcggccagaccgccggaatataataatacagctgccacggcggactggatgacgccccagatgattttcacccggtttgacgggtccaaagagccgtaagacgtttgcattccaagcacaaatgtcgctgaatccgctgatgtaataaagaatacagcaatcagaataagcgttaatacggatgtcaccattgtcagcggatagtggctgagtgcgccgaacagcatcgtatccgttgacattcccgcgacattgaatacgcctttctgctgaagatccatcgcggatacaccgaaaatcgcaaaccataagaaagccaatatacaaggtgtcaccaacaccccgattaaaaattcccggatcgtccggccccttgatacacgggcgataaaaatgccgacaaacggcgaccaggatatccaccaggcccaatagaaaatggtccagctgttaatccattcgcgtttttggggatcattcggagacaagcgaaagctcatctgcacgatattttggatgtattggccgatagaatcggtaaatgagttcataatcagcactgtcgggcctgcaatgagcataaagatcattaaaatacccgcgagcgccatgttggtattgcttaagtatttaatccctttgccgattccgctccacgcagaaatcaaaaataacacggtcacgacagcgatcaggatcagctgaatggaaaatgttttcggaatgccgaataaataatgcagaccgccgttgatctgagtcgctccgagccctaagcttgtcgccacaccgacaacggtcgcaaacaccgcgatacagtcaattgctttgccgatcgggccgtttactttatcgcccaaaagcggtgtcagagtgctgctgatcaaaccgggcgcgtcttttctgaattgaaaataagcgatacataaagcgacgaccgcatagatggcccaagcgtgcagtccccagtggaaaaacgtgtaccggagcgcatcacgaaatgcttggggtgtttctgtttcacctgagggagagctgatggcgtaatggctgatcggttccgcagccccgtaaaataccaaaccgattcccatgcccgcgctgaaaagcatggcaaaccatgataataagccgaattccggtttttccccgggttttccgagttttattgtgccgatcggactcacaatgagaaagagacagaaaccgacaaatatagaaacgaccagcagataataccagccgaaagaatccgtaataaatttttgtgccgtatcagtgacttgctgcaggctgtcaggagaaatggccccccataaaaccgcagctgctgtgatgacaatcacaatccaaaaaacactggagatgttcttcttcaaacgttctcaccctctgactatttttttcaatacgccattttttagtatggtcgcacgattgcagatcattcctttcttcctgttccctcaatcaggtgaaacaaaacgcagaaaactgtatcatgtttttggtcaattatcaacggggacgctcaggtaaatgcgctttaaaccatttacagcgagcgtgagaaacgtcctgcattcaaaccggcgagacgccccgtgacaaaggctgaagtgatattgtagcccccggtataaccgtgaatgtcgagtatttctccgcaaaaatataagccttccatttttttagacgccatttgtttcggctcaatctcttttacggaaacacctccgcctgtgacaaacgctttgtccaaagaaagcgttccgtcagcggcaaccgtaaattgtttgcagtctttgacaaaagccctgaattgatccttcggcagttccgtaaagcttgtctgcggatcaagaccgttccgttccagaagaaaaagcagataccgttcctgcatccacggcttcagtgcgtttttgagcgcttttttcggtgcgtctttcagttccttgtgcatcttttgaaataactcttcctcgttgatgccgggaaacagatcgatgcgtaatttgacatcgggctgctttttcagttctttgacgacaaactggctgcagcggagaatggcggggcctgacaagccgaaatgggtaaacagcatgtccatcacgtgtgtgacaataggtttgccttttttattcaggacgctgacggccgcgtttctaagggacagcccctgaagtgttttttgtttaataaacggttctgacgacgtaaccggcacttccgtcggaaagagttcggtcacggtatgaccggccgcttccgcccatgcatagccgtctccggtgctgccggtatgcgggactgattttccgccgaccgcgataatgacggcgtctgcgttaatgtgttcgtcattgtttgtcgtaatgcccgctgtcctgccgttctcgtaccgcacctctttgattttttcatttgtgcggatggtgacattcagttgttttaatcggttcaaaagcgcatcgacaacgctttgggctttgtccgtcaccgggaacatgcgcccgtggtcttcttctttcagctgaatgccgagtttttcaaaaaaggcgatgatatcttcattattaaattcggaaaacgcgctgtataaaaagcggccgttgccggggatgtgtttaatgatttcttcaacggggaggcggttggtcacgttgcagcgcccgccgccggaaatcgccagcttccgtcccagcttgtttcctttatcgattaataatacgtccgccccttcttcgcctgccgcaatcgcagccattaaaccggacgggccgccgccgatcacaattacgtcataatgtttcatatttcatcaacaactttctttttcacgtataataggcggaaatgtccgcttcctgctattatagcgaaagaaggggattccttaaacgtattttgtttttaagagctttcccaaaaagtttcccgctgtaattattaccgtctaattgcccagttgtgttaaaatagaaaagttgaatcttcgtagaaaatggtgatgaggaaacatgtcaagcaaattgttaaggggcacgttcgtgctgacgctcggcacctatatatcgcggattttagggatgatttatctgatcccgttcggagcgatggtcggagcgacgggcggagctttgtttcaatacggatataatcaatatacactgtttttaaacattgccacgatgggatttcccgccgcggtttcaaaatttgtctcgaaatataactccaaaggagactatgagacgagcaggcggatgctgagagcgggaatgtcggttatgctcgtaaccgggatgatcgctttttcaattctttatatttcggcgccgttttttgcggaaacatctctcggcggcacgagtaacaacggacttacgattgaccacgtcgtttatgtcatccggatggtcagtctggcacttttggtcgtgccgattatgagccttgtgcgcggttttttccaaggtcatcagatgatggggcccacagccgtttcacaggttgtggagcagcttgcccggatcatctttttattgggcgcaacgtatttgattttaagagtgatcaacggcggccttgtcatcgcagtcggatacgcgactttcgcggcgctgatcggatcattcggagggcttgtcgtcctttatatttactggaataagcggaagggcgatcttctggcgatgaagccgaatctcgtcccgtctgcgaacttaagttataaaaaaatgttcattgagcttttcagttatgccgctccttacgtatttgtcggactggcgattcctttgtattcatatatcgatacgaatacgtttaataaagcgatgattgcggcgggccataaggatatcagccaggacatgcttgcgattgtcaccctttatgtgccgaagcttgtgatgatcccggtttctctggcgaccgctttcggtctgacgctgattccgacgattactgaatcgtttacgagcaggaattataagcttttgaatcagcagattaaccagacgatgcaaattattctgtttttggttattcccgccgttgtcgggatgtccgtgttatcgggtccggcctatacgttcttctacggctctgaaagtcttcgcccggatatcggacaggatatattgttctggtacgcgcctgtcgcgattctgttttctctgtttaccgtaaacgccgcgatcctgcaagggattaataagcagaaatttgctgtcgtgagccttttcatcggcgtcattataaaagtggtgctgaacgtgccgctgatcaagctgtttcagggagacggggccatcttggcaacggcgctcggttatatcgcttctcttctgtacggttttatcatgattaagcgccatgcgggctattcgtatacggtacttataaaacgggtcattttaatcgcagtcctgtccgtcgtgatgggagtcgcggtcaagctgactcaatggctgctcagtttctttgtaacataccaaagcggccaggtgcatgcggcgattgtcgtctttgtctgcgccgctgtcggcggtgcggtgtacatgtttgccgcgtaccgaatcggatttttacagaaaatgtttggaaaccgtctgccccgcgttttgaggagaggcaggcattccgcccattgagaaataatgaatagtccgcttatcgcgggcttttctttttaaaggagaggatcaggatgagacttgataagctgcttgccaacagcggattcggctcaagaaaagatgtgaaaaaaatcgtcaaggccggggctgtcatgattgacggagagccggcgaaagatgtgaaaacccatgtcgatccggaaaaacaggacatcacggtatacggagagccggcagactatcgtgaatttatttatgtcatgatgaataagccgcaaggagtgctgtccgctacagaagacagccgccagcaaacggtggttgatctgctgacgcctgaagaacagcgatttgaaccgtttccggcgggacgtcttgataaggatacggaaggctttttgcttctcaccaatgacgggcagctcgctcatcgcctgctttctccgaaaaagcatgtgcctaaaacatatgaggtccggttaacttcacctctggcatcggaagacatcgttcatctggaaagaggcgtcgtcattgaaggaggctataagacgaagccggcagccgttgaaatcattacagaaaacccggatgaaacggtgattcacttgaccattacagaaggcaaatatcatcaggtgaagctgatggcaaaggctgtcggaaatgaagtggcttatttgaagcggctttcgatgggggctgtttctcttgacccggatcttaaaccgggagaattccgcgagctgactgaagaggagctcgaaacgctgagaggcgctgaagtgtaatcgatatcagaaaagcccaaaacagatttgttttgggctttttatatagaggaacaaaaaacaaggcaaagacgctgctttgccttgcagcatgtcaggccgaaaagggccttatgtaattgttcgcttaagatgtaattttcactttttttcgtgttgtctcccacttgcctcggctaggactatgaacaagatcattgtatgctaacacatttaagtctcgctgaatggttctaggtgtaatgccgaattcatcaaccagttcctgtgttgtcacaaggcctttttcctggatgaacatgtaaactgatttaatccgagtcagcatacgatttgttgaaggtttcaaaaaaccactccctatcataagatcggatggacttgatataccacaactttcgactctaaaacttcgtacgaataagcaacaaaggatgacattctgttttttttctcttttaactgcctccattatacacgatatggacgacatgaatctaggaataagcgcagataattttttccaaatgggtgcagccttggtgcattactatgtccggaccgcttttaatattatggaaactgaaacttttttatacatgtccgtatgaaagcgggggagtgagaagtttgggagaattattgaatgcaaacattgtctgcgccggttatgctgacaggccgaaggtgatttccgatgtatctctgtcagtcaacgctggtgaaattgccggtttaatcggagcgaacggcgcggggaaaagtacagtgataaaggcggttctcgggctgtcccgggatattgaaggcggtattgagtggaatgattcatcttatgcttacataccggagcggccgagtttttacgatgaactgacgctttgggagcacctcgagctgaccgggtcattgcggggtatagaaggggaagagtgccgtgagcgggcagggcggctgcttgaagagttttcgctgacgtctgtaaaacatgatttgccttccggtttttcaaaagggatgcagcaaaagatgatgcttatacaggcatttttggcgaagccggatatttacatcattgatgagccttttatcggacttgatccgatctcaacgaagctgtttaccgacatgctgattgctgagaaagaaaggggcgcgggaattttgatgtgcacgcatgttctggatacggcggaaaaaatctgcgaccggttttatttgctggatcagggcgctctgcttcttcaaggcacgttagaggagcttcaggaaaaaacggggagccgttcactgctggattgcttttattcagcggttcggagcagtcagcgatgaccgggcgggctttgttttttcaaaggctgtttcattattggcggtatcaatggaaggtgtttcagacggtcattgattggacggtcgcgctgtacatcgttcttcccgctgccgcatttgccgtttatcaatatgctgaatggctgaacggcagggggcttcttaatggagcggcaggagtattaggatggggctggctgtatgtattcagtgccttgctgttgtgcacgggttttattcatacctttttgctggaagcggatcacgtgtttttggtgcatgcaaaacatctgatgcaaaagctgaaacggtacgcgcttttgtattcgatgttcctttcccttatcaaatggggtgcgcttgccgtattgttatttcccttatggcgccagtacggtgactgtaccttaccggcatattcaggtatgttttgctgtctgttcggcttccataccgcgatattagcggtgcaccggcacagaaaaaacagcaggcggacattcgggaatcaggcggcgggctggctgaaagtgatggttctgacggcgggtgcgttttttatgatcacctttgccgccgaatggtattggctttggccggcgggatgtatattgttcatctgttccgcttttttgacttggaaagggacggagacattatcagcctttgaggaagaagtgcttgaggagaacaggcggaagctttcactcgccgcctcagttttgatgctcagccatgatgtgcagctcccgaatggtaaaaataaagggcggagcaagccgtttttatatcccggctcaaagcacatctttacaaaacggtcggcgtatacggcgtggaaagaattgttttttaaagtgctgatccgaaacggcgggtatctccggcagctttaccttttaaccgcggcttttacggctcttattctcgttcttccgctcttagtgaagccggcagtccttattttatttgcgatcgtcagccgctatgccgcgtcacttttatttgaccggatcacggataaaccggttttaagcggtatcaagagagacagtgatgactatttccgggcgcgaaacagtgcattaaccgtcattcaaatcatctgttccgcctggtgtctcattgccgcgattctttccgttctttatatgtaaaaatccctttccgaaaaggaaagggatttttcttaatgtccgttcaaaataaaaagctgaataaaaaacagcacggcgaagatgaggactagaggatggatttcgcgccattttttcttagctgctttaacaagcggatatgaaatgaagccgagtgcgattccggttgaaatactggacgttaaaggcatcgccaaaatgacgagaaaggccgggaacgcttcgtcaagctcattccagcggatattcgacacagcacccatcatcaggctgccgacaataatcagagccggtgacgtaatcgcggacacttccgataagacgctgacaagcgggctgaaaaacatggaaacggcaaacataacggcaatcgtcagcgccgtcagacctgttcttccgccggcggccacacctgctgaagattcaacgaacgcggtcgtcgggctggtgccgaagatgcttcccaccgtcgtagccgttgaatcagccaacagcgctcttctggcattcggcagctgattgtttttgatcaatcccgcttgttcagcgacaccgatcatggtgccggtcgtgtcaaaaatcgtaacgagaagaaaagaaaacacaacggcgtacagaccgtgatgcacgacatccccgagggcaccgaacggatttgtgattaaaagcccctccggcaggcgcggaaatgaaatgaaccctttcgcaaaatggatctgtccggtcaaaaaggcaatgacggcggtcagcgccattccgatgaacagagcgccgtttacattcagcaccatcagcacgatactgatgataagtccgataagcgttaaaatgacggcgggcgaatgaagatcgccgagtgcgaccagattggatttatcagccgtgatgattccggattggcgtaagccgataaaagcgataaataagccgatgccggtcgtaattccgtattttaaattgtccggaatcgcttctataagttgttttcttaaaggcgttaacgataaaataataaagatgactcccgcgataaaaacggcgctgaaagccgtctgatacgtaatgccgctgcctgtgccgacaacgtgaaaggcgagatacgcgtttaagcccatgccgggggcaatggcgatcggaaaattcgcagcgagagccatccataaagttccgacaatggaagcgataatcgtcgcggtgaacacctggtcaaacggaattcccgcattggaaaggatcaccggattgacgacaatgatatacaccattgtgaaaaaggtggtcaatcccgcggtaatttctctttttattgtcgtttgatgcttgtcgagatgaaacataagtacctccaatgacgaacattttttcaaaacatcatctatattattcgttttatcgacattttgcaagtctttatcaagaaaggggatttgtgatgaactgggaagttgaagtcatcagaaacaaagaagatctgatccgtgacacgcagaagtttttgcagatcaacagcgtaatggacgaatcaacagccggtcccggccggccgtttggagaaggcgtcaatgccagcctggcgtcactgctggaattcggtaaaaaagaaggcttcaccgtaaagaatcttgacggctatgcgggccatattgaatggggaacgggtgacgaaatcgtcggtgttttgtgccacgtcgatgtcgttccgcccggagacggctggacgagcgatccgttttcagccgatatcagggacggccggatatatgccagaggcgccattgatgataaagggccgacaatggcggcgttttatgcgctgaaaatcgtcaaagacatgcagcttcctttatccaaacgcgtgagaatcatcatcggaacggatgaagaaagtgattggagatgcgtggatcactacttcaaacacgaaaaaatgcctgacatcggctttgctcctgacgcagattttccgatcattaacgcggaaaaaggaattatagatgcgtcactgcgcattgtaaaaaacgcttctgacaaagacgcaaaaaacgtgcttctgtcattccgttcaggactgcgcttgaacatggtgccggatgcggctgaagcggttattgaagggaacggtattgatgccgtgcacgcatatttcagcaaatggcttgagcagtcaaaaacacaaggtgaagcagtttcggaaaatggaaaactgacgcttcgggtatacgggaaatcatgccacgcgatggaaccggataatggtatcaatgccggcttaaagcttgctgaatgccttaacggaacagagctggatggagccggaaagcactttgtcaaaaccgtcagtgactattttttaaatgatacacgaggcaaaaagctgaaaattgattgcagggatgacatcagcggagagcttacattgaatgtcggcacctttacatacagaaagggtgaggatggagaactcggcatcaacatccgttatcccgtcacttcagacagcaaagtcatccgtgatgcttttacgtctgctgaagaattccggcttgaagaatttaaagacagcaaaccgcaccacgtttctgccgatcatccgctcgtaaagacgcttcaaaaggtttacgaaggacagacgggaaagaaagcggatctgatttcaatcggcggaggaacgtatgcgagatccctttcggcgggcgtcgcgttcggtccgctgttccccggccggcctgacagcgcgcatcaaaaggatgagtacattgaaatcgatgaccttctcaggtcaacggctttatatgccgaagccatttatgaacttgccaagtgataataaaaagggacgccgaaagcggcatccctttttatcattcaaatgaccataaatccgtggataaataacgttctcccgtatcggccgtcatacagatgacgatctgttcgggagggaggcgtttggcggtttcaatggcggcgaagcaggcggcgcctgaagacgggccgacgagtatgccttcttcccgggccagacgacgtgttgtcgtatacgcatcttcatcagatattttcatgatttcatcgtaaacgtcctgattcagtatgccgggaataaatccggggcttgtcccgacaagcttatgagcgccgggttttccgccagacaggacgggagatcccgcaggctcggcgacatgaacaatcatatccgggaaaagctctttcagcgtttctccggttccggtaatggtcccgcccgttcccgccgttgccacaaaagcaccgagcggtctgttgagctgctgaacggcctgatagatttcaatggcggtcgtttttcggtgggcatctggatttgcgccgttatcgaattgcatcgggataaaacttcccggaatctgttcggcgagttctttcgcttttttgatgctgccgggcattctttccgcccccggtgttaacacaacctccgcgccgtacgctttcaggaggttgatgcgttctttcgtcatcgtgtcaggcatgacgaggattgccttgtagccgcgcgccgccgcgttcatcgccaggccgatgcctgtgttgccgcttgtcggttcgatgatgacagagccgggttttaaatgcccgctgttttccgcttcaatgatcatattgtaagccgctctgtctttgacactgccgctcgggttaaacgattctaattttaaatagacctgtgctgcatgttctggctgaaggcgattgagctttacgatcggtgtgccgccgatcagctccgccgtgctgtttacgattttcaaggccggctcattcctttctgtataaaacgttcggtacataatatcctatcataatgagcggacagggttctcctctccgcttatccgttttataataacaccataaccaaagagggggagatcctcgtatgaaagcttcattgccgcattattttatcggcattccgattccggctgacattgctgaaccgatttgggaagcagccaaaaaggagccggcgttatcattcaaaaaatgggtgcacccgcatgactatcatattacgctcatttttctcggagccgcggatgaagaacggcttgcgaaattatcgtctctgctcgcagatgctgcgtcggcagcgcagccgtttaccgtacagtttcagcatctggatattttcggcgaccgcagacagccgagagtgcttcaccttgagcccgaacggaatgaactgctctttgatttgcgggaaaaaacaaaacaggctgttttgaaagccggttttcaagtggaaaaacggccgtatcaccctcatatgacgatggcgcggaagtgggcgggagaccggccgttttctgacgatgtgccgtttgaaagcggcagggtgcaaagtgccgtcagcaggttttccctgtttcagacccatcttgaccggtcgcctaaatacgaagaaatcgcacagtttcaattgacataaacaaatattcggagtggagaaatcacatggcacagatcatcaaaattcacgactgcatatccagatatgaacttgatccataccattatatgaaccagtttatccggctgaagaaagaacgctgggaggcgcttcttgaagcgtttgaccggataacggaagaaacggaaacggctgccggcggggaaaccgatcaagcgccggccaggaaaaaattttccttaaaaaagagaaaagaagaaaatacggccgatataaatgaaaagaggcaccaatggtttgatgaaccggagggagaagaggcgctgttcgggaatcttccgtctcaaaagtctgagctcgcgccttttttcaaagatcagctgtatgactttcaattaaaatgggcgagctccacgctttctcaaaagtctgagctttcgcaggcggtcaaaagggacaggatgttaaaaatgctggctcaaaaactgcccgattcctattttgtgatgtatcatccggttctgcaaattcagcaggcgtccgtcgaactgagcattatcatcatctcgccgctggagattttctgcgccgcttttatggaagcggaagaggacagtgtatatatcggatcaaaacaccgtttttgggaagaaagaggctccggcagcacgcgccaagtattgaatccgtctctcagcctgcaccggacgggctcggtcgtttcgcaaatcgtaaaagaaaagcaggccgacattcccgtgcggaagcttttgctcagcagaacgtcttatattgattacccggagccgccgtacgggctggaaatagctgataaacggactgcggcagggtggctggaaaagcagcagaaaaatacggcgccgatcaagcaccaccagctgaaggcggcgaaggctcttttgtcttacggcttgagcgattcaagccggagacaggaatggcttgattaaagcggacgtttgccggctgtctcttcatctatgaagcaggtgaaaacaaacgatgagtcaatggttttttattattaatccggtctcaggaggcgggcggggccggcgtgtctggaaatcagttcaaaaagagctgaccaggcgcggggtcagccaccgctcttttttgaccgggcatcccggacatgcggaggtgctggcaagacagatttcaatgatgcaggatcataagcttaagcggctgttcgtcatcggcggtgacgggacgatgcatgaagtcattaacggactgaaaggaacggatcagattgagctgacctttgtgcccgccggttcgtacaatgacttttccaaagggctcggtattaagaagtcggcgctcctccaagaaatcaaaagtctgcaccgcccgctcacacggaaattttttgcgggaaacatcaacttttttcatgacaaagcgcaatcactctattttattaaccacctgtctgtcggcttcgatgcctcagttttgaaggcagccgcgaattttccgttttcgcgcgttcttcggtttttgcgtctcggctttgtgatttacccgctcgcgcatttacatacggcctcggggtttcagccgttcagatttgtttgcacggcagacggccagagacgtgaattccgcaatgtctggtttgttattgcggctaatcacccttattacggaggcggcatgaaagcggcgccttcagcaaatccccgtcaaaactattttgatattgtcattgcagaaaacctgtcctttttttcgctgtatcgttttttatgggcgatgagcttcggccggcatatcaaaatggacggagtgacgatgataaaggggaaggaattcgtttttgaaacagatgggaaaattccgtttcacgctgacggcgagctgatcggaacgacgccgtttcggcttatgccgggcggtgcgccattgaaaataaaaacataataaacaaatgaaacccgtcaattgtttcacggcaacagagcggttcgcggcataaatcttcagaattcacaggtgttcttgctagttttgcttgacgaagtttgtgctgtagcgctaaaatttataggacggctattgattagcatatgagactctcaatagctgtcttttttattctcatgaaattgtttatgacaggccgctccgccaatagagaaaggctggaggcctattctaaaatattttaagaaatgatgggttgaacattgatatgaactggttgggacaattactaggtagcgattgggagatcttccccgccggaggagctacaggagatgcatattatgcgaaacataacggccaacagctttttttaaaacgtaatagctcgccctttttagccgtgttatccgccgaaggcattgttccgaagctggtttggacaaaacggatggaaaacggagacgtcattacggctcagcattggatggcgggcagggagctgaaggcaaaggatatgagcggacgcccggtggctgagctgctccgcaaaatccacacatcaaaagctttgctcgacatgctgaaaagattgggaaaagaaccgcttgatccgggcgcccttttgtcgcagctgaagcaggccgtctttgccgtgcggcaattttcgccgcttattcaggaaggccttgcttatttggaagctcatgtggatcaggtgcaattcggtgaaaaagtcgtttgccattgtgatgtgaatcataataactggcttctgtctgaagacaaccagctgtatttaatagattgggacggcgccatgatagccgatccggccatggatctcggccctttattgtatcattacgtcgaagagccagcgtgggacagctggcttgggatgtacggcatgaagctcacggaagggcttcggctgcggatggcgtggtacatgttatcggagaccatcaccttcatcgcctggcacaaatcaaaaggaaacgacaaagcgtatcatgatgccatggaagagcttcatgccctgatgaagcggattgtcaagtagtcaggagtacgaatccatctgctccacccattgggacaaatggttttggtgctcctgaatatgcgtgtcgatggaatcggccgtgatgccggactggctgtagcggtagacatcctcgagcacgttttttatatttgaatcaagcccggtgttggccatcagtgatttgatgacgcgctccagctgttcatactcggcaaccgtgccgcagcaatccaattgatggtcggccaatatgtcctttaataaccggacctgatgttcgcttgttaagcccatgattcatatacacatcctttctgtgtcatacattgtgcaaagcggtgcggttttatgcatcacatgagtgttccggaccggggagcctctttttttatgcggccggcgcctttaaaaggcgcttgcggctctttatgtttcatggtatgttgttactcgaaattatagatagaggtgtcaatcatatgagaatgcgccataaaccttgggcgaatgattttctggcagaaaacgctgacatcgccatcagtgatccggcccagtataaagggcggtggaatacggtctttggcaatgacaacccgatccatattgaagtcggtacgggaaaagggcagttcatttcaggaatggccaagcagaatccggatatcaactatatcggaattgagctgtttaaaagcgtcatcgtcactgccgtccaaaaagtaaaggacagcggggctcataatgtccgtttgttaaatatagacgcggaaacactgaatgacgtatttgaacggggagaaatcaagcgcgtttatttaaacttttctgacccgtggccgaaaaaccgtcacgaaaagcgccgtttaacatttaaaacgttcttgaaaaaatacgaagaagtgatgggcgaaacaggtgagattcatttcaaaaccgataaccgcggtttattcgaatactctctgaaaagcttttccgaatacggcctgcttctgacagaagtcagcctagatctgcacaacagcgatccgaagggcaatattatgacagaatacgaagaaaaattctccgcactcggccagccgatttaccgggccgaagttgaatggagaacaaaagacagactctgatgcgggagtctgtttttttatgccgccatttgctaccattatatcaggagggatcaagatggagacattgaatattgggaatatttcattaacatggctggacggcggtgtaacacatatggacggcggagcgatgttcggcgttgtcccgaagcctttatggtcgagaaaataccccgtaaatgacaaaaaccagattgaattaagaacagacccgattctgatcagaacaaacggcctgaatatattggttgacgcgggtatcggcagagggaaattttctgataaacaaaaaaggaattacggtgtaacacaggaatccaatttaaaacactctcttcgtgaactcgggctttcctgtgaggacattcatattgcggcgatgacccatcttcattttgaccatgcatgcggcttgacggaatacagcggagaggagcttgtctctgttttcccgaatgcccgcattatcacttctgcaacagagtggcgcgaaatgagaaaccctaatatcagatcgaaaaatacatattggagagaaaattgggaggcggtacaagatcaggtcgaaacctttgagaacgagtatcagctgacagaaggcattacgatgcaccacaccggaggccacagcgacggccacagtgtcatcgtcttagaagacggcggggagacggctgtgcattttgccgacctgatgccgacgaatgcgcataaaaatccgttatgggtgctggcctatgatgattatccgatgacctccattccgcaaaagcagaaatggcagacgttcgcggcagaaaaaggcgcctggctgattttctatcacgacgcgatttacagagcggtaaaatggggagaagacggcgaagtggctgcatctgtcaaacgggagagaaaataagcggatcgatgatttacctgtatgaatttcgggaataaaagcaaacctaagacaaattgctttgaaaggaagagacaggtgaatcaatttcaagtgacgaaagatggagaaatcaaaacaactctgcgcggattagaagtgctttctacgccttttttaaataaaggggtggcctttacacaggaggaaagaaaggaactcgggctcgagggatttctgccgccgaaagtattgacaatcgaagagcaggcgaggcgggcctacgaacaattcagttcgcagcctgatgagctgagcaaaaatgtgtacttgaccgctctccatgatcggaatgaaacattattttacaggctgttaaatgatcatttaggcgaaatgctgccgatcgtatatacgccgaccgtcggcaccgcgatccagcgttacagccacgagtacagaaaaccccgcggtctgtatttgtcaatagatgaccctgaaggaatgcgcgccgcatttcagcagttcggaaaaaatgaaaacattgacttgatcgttgcgacagatgcggagggcattctgggaatcggtgactggggcgtcggcggcatcgccatttctgtcggaaaactcgcggtgtatacggcggccgccggaattgatccgtcacgagtgcttgcggtcgttttggacgcggggacaaatcaagaaagcctcttaaatgacccgctgtatgtcggaaaccaacattcaagagtgcgcggcgagaaatatgaccgctttattgatgagtatgtctcgcttgcccgggaaacattcccgaatgcgctgcttcattgggaggatttcggcacggctaacgcccgcggcatattaaaacggtataaagataaagtctgtacgtttaacgatgacattcaaggaacaggcgcggtgtcgcttgcagctgttttagcgtgtgcgaaagcatcaaaagtgcctttaaaagagcataaagtcgtcgtcttcggcgcgggaacggccggtatcggaattgctgagcagctgcgcgaagctatggtgcataacggattaagcgaagaagaatcatacagccgcttttggtgtatcgacagaaacggattgttgacggatgatatgaaggacttgcgtgattttcaggttccgtacgcccgccctgctgatgaagtgaaagagtacggccgcagcggtgaaggcggatcaattgatctggcggagacggtgcgacaggccaagccgacgatcctgatcggcacatctaccgtttcaggcgcatttacggaagaaatcgtcaaagaaatggcctcacatgtcaaacggccggctattttgcctatgtcaaacccgacgacattatcagaagcaaaacctgaagatttaattaaatggacggaaggccgcgcgcttgtcacaacgggaagtccgttcccgcctgttgcgtataacggcgttacctaccatatcggacaggcgaacaacgcgctcgtattcccgggactcgggctcggaacgattgtgacaaaagcaaggctcattacggacaatatgttcgttgcctgcgcgaatgccatcgccggtatggtggacgtcggcaagccgggcgcgccgatgcttccgaaagtggaggatctcaggacggtatcggcaaccgtggcggtagctgtagctaaagctgcgattcaggacggtgtagcggaaacggaacccgaggatctgatccaagcggttcaggacgcgatgtggaaccccgtatataaacgaattcggccgatgtaaccgaataaagcccaaaacgctgatggttttgggctttattttttgcttgtccgaattatgaggcgacagaatcaatgacatcgacaatctggcctgtttttgcattgaccataacttcatattgctccagttcgccgaatgccgaacgtgtcacgccggttttgtatacctggatggtttctccgtttacctggtagggctccggctctgtgtaaatccatgatccgtctatcggcccgcgctgtttaaaagccgctttcacgatacggagcgctttttctgaagagatataaggtttcatcgcatactttttcactgcgatggcagcgcataatccgactcctgcacctaagagaaaatgacgtaatttcaatatgaagcacctccaattatgtcgtagtttttattatacagaagatgccagacggtgttaagtaaagcggcggttttacagcccattcaatctgagcgcttggaaaacggttgtttttctaataaaataaaagcattacatagaaatgaggggaaaatatgaatgaggaaacgaaaacgcttttccggacgctgacgcagcttcccggcgcaccgggaaatgaacatcaggtccgctcttttatgaaacgggagcttgcgaaatatgcggatgacatcgtgcaggacagactcggaagtgttttcggagtaaggcgcggcgctgaagatgcgccgaccgttatggtagccgggcatatggatgaagtcgggtttatggtgacacagattacggataacggcatgctgagatttcagacgctcggcggctggtggagccaggtgctgcttgcccagcgtgtcgaggtgcagacggataacggaccgattatcggcgtcatctcaagcatcccgccccacattttaacggatgcccagcgcgcaaagccgatggagatcaaaaatatgatgattgatatcggtgccgatgacagagaggacgcggtcaaaatggggatcagaccgggacagcaggtcgtgccggtctgcccgttcaccccgatggccaacgagaagaaaatattgtccaaagcgtgggataaccgctacggctgcgggttaagcattgaactattaaaagagctgcacggaaaagacctgccgaacaatctgtacgccggggccaccgttcaggaggaagtcggcttgagaggggcgcagacagcggccaacatgattcagcctgatctcttcttcgcgcttgatgccagcccggcaaatgatatgagcggcgataaggagctgttcggccgtctcggcgagggggtgctgctccgcattctcgacagaacgacggtcatgcaccgcgggatgagagagttcgtccttgatatggcggaaacgcacaatatcccttatcaatatttcgcttcaggcggaggaacggatgccggacgcgtccacatatcaaacagcggggttccgtctgccgtcatcggcatttgttcaagatacattcatacaaatgccgctatcatccatgtcgatgattatgccgcggcgaaagaaatgctcattaagctggtcatggcgagtgacaaacagacggtcgaaacgatcagagaaaatgtgtaaaaaaaataagcagtcaataagtccctttgaatacttattgactgctgtttttacattctgttttaagccgcatgatcgagacagttctttgttgtgaatataagtgtaaagcgtattgtaaatagaattaggtaacacatattatttttcaatattattatcaaaatggttccgatccagataaacaaccttcgaacctttattgcaatgataaacgtttttaaatcaaaaacatgctgcaagcattgagaggagcagcgatttcacaaagtcgagtcatttgcatttttatttgttctgcaagaaggtatgattatgacaaaaaagacaaatataaactttcctcttgaactgattaatactgaagtggtgagtgtaggtaagcaggaccgcataaaagcggcctgcttattctgtttcaaataaataagagagtgctttcatcgcttgattgacggtttcgaccgtgatattcgcttttccggaaagctctttcagcggatgatgaagttctttcggacggatgagaatgagcggctttccttttgcgatggcataagaagcatccatcgcggtattccactgtttatatttctcgccaaacagggcgatcacaaaatcggctttttccatcagcacctctgtacggaaattgttgatatcagaagctctggcgtcttttaaaacagaatcgggctgcacgcccataatctcttctccgatattgtctgagcgttcatggttttccatcggaccgacaaacgtaatcggcaggttcagcgcttttgctttttgtttgatttcatcccgccaatcactgtggatttcacccgctaaatacacgacaaactgcatcttttgcccctccttatgtacatattcagattttcgtacggctacaagcaaaatggtaaacgaaacttgcttgataatgcaaatgaaatatgataatgatattgcatatagttggtcttgccgtaaacagtctggtatgatccaattggacaaacatcagcatataaaaaactcataatccagatggaggaatgacaatgaaaaagattgaaagcacggaagaattgcaaaaagcggtacaagacgattgggcggtatttatgttttcagcggattggtgcccggactgccgctttgtggagccgtttctccctgagctggaagcggactttcctgaattcacttattactacgtagaccgcgatcaatttattgatacatgcgcggaatgggaaatttacggcattccgagctttgttgtgtttaacggaggaaaagaagtgaaccgcttcgtcagcaaagaccgtaaaacaaaagaagaaattgagcaatttttaaccgattcccttgctaaagcataaaggaggccacgggctttgaaaatgacgtcaaggaagctggcggatttattaaaacagcgcctgcagcacgagaaccgatccttcttttttgacagagaaaaagacaccctccgtgttgaggatcaaacgaccaaaaaaggcatcacattggagctcccgccgatcattgcgaagtgggagacgaaaaaagaagaagcgatcgacgaaatcgtctactatgtgtcagaagcgatggaggcgatggaaggaagcggacaggagatgtccggaaaggaagccggaatctatccggtcatccgctccacgtcatttcccgatcaaacgagcgacggcattccgctcgtgtatgatgaccatacggccgaaacgagaatctactacgcgcttgacctcggcaagacgtaccgcctaattgacagccgtatgctcgagaaagaaaactggacaaaagaacggatcagggagacggcgtcattcaatctccgctctcttccttcggtcgtgaaacaggatacggttgcggataattatttttattttttcagggcgaatgacggctatgacgccagccggattctcaatgattcgattcttcatgaatataagcaggccgctgaaggcgaattggcgatttccgtcccgcatcaggatgtattaatacttgctgacattcgaaatgaatcgggttatgatattttagggcaaatgtccatgagcttctttgcaagcggcacggtgccgattacggccctttcatttctgtataatgaaggcagactggaacctgtgtttatcatggcgaaaagccggccgaaaaaggattagaaaggatttttcttatgaacgctttttacaataaagaaggtgtgggagatacgcttctgatctctcttaaagatgcagcacgcgaagaaatcggctatgaaagagaaggcgatgtcgtcagaatctttaacaaagaaacaaaagaaacgacgggctttaacatttttaacgtgtcttcttacttacagattgaagacaacggccccgtcgctttgtctgagactttcgtacaggatgtgaatgaaatactgaacagaaacggcgtttcagaaacgctgacggttgacctttctccgaaatttgttgtcggtcacgttgaatcgaaagaaaaacatccgaatgcggataaactgaatatctgccaagtgaatgtcggagaggaaacccttcaaatcgtttgcggcgcgccgaacgtggacaaagggcaaaaagtcgtcgtcgctaaagtcggtgcggtaatgccgagcggacttgtgattaaagacgctgaattaagaggcgttccgtcaagcggcatgatctgctccgcgaaagaactcgctttgccggatgcgccggcggaaaaagggattcttgttcttgaagacagccgcgaggccggcgaagcatttcaattctaactcccataaataagcgcacagaatcgaatgatgtgagagaaagccgttaagcaggcctgcttaacggctttcttcagttgggagcttaatcttttctgagccgcccggcaatggtatactaaatatcgtcccagactactaaaaagggagttagagagtgattaaacatgagttggctgaataaattttttgacttatttttaggtgaaaaagaagaagagcatgaacgtgaaccgaacacgcatgcccaaatccagaaacagcaaataccggatcagccagaaggcaaattaacgcgcatggaagattctaaaatatattacgaatatccgaaagggaatttccgcttcccggtcgttccggacggctataagcgaacggagcaaaaccaaagacagcgggaaaggcacgaacgccgccagccgtcccggggttatgccgccgggaaggagcaaacggagcggaaacagcatacacataaagagcctgatacggtgaaaaagccctttaaaccgtcatccattccttcaccggtttacggctttcaatctcagcacagcatcaaaaaagcgcctatttccgaaaagcggcgtgaagagaacgtaacattgctgtcagaggagcaatttgttccgccaaaatccggtcaggaaacggaaaaagagcccgtcttcacaacatccggtataacaaaacagacgaatgaccggccagaaccgtttgcgaaacaagaaacggaagaaattccggccgttaaaaaagaggagcttcacacggaggctgagaatgcaaaagagcaagtgtttgcagcaccagaaccgcagcaggctgaagagctggagcacaccgaaagcgcggagtctgccggctttacagaagaacaagagcatgaacaaacccgcccgcagcctataagagagcctgagtctgaagcatcccgaacggctgaaaacacagaggaacaagcggcgccggagggggaacatcaggagcctgagccggaaaaagcaccgccttttgaaaccgcagaagaaccggtgtatacatacacagaacccggatacgaggaaattcagccgcagtctgaagacaagcccgaatcagctgaacccgacgcgaaacaggaagcagactctcagcctgagtacaatgaagcagagcggcattcagaccccgagcctgaacctgtaagcattgagacgaccgatgccccatcccggcctgccgaagaaaaaacggagcatcacggacagcctcagactgtgagaaaagcggagcagccgaaagagcgcaatgttccgtttaacgtcatgatgcttaaaagcgataaacacaagcagacgaagacgccagagggcggagcgagctatgtctttccgaatctgtcgcttctggacgtaccgccggcgcaaagacatgacgaccaatcgtggattgaagaacagcgcgagcttttaaacgttacactgaaaaactttaatgtgcgcgcccaagtcgttcatgtcacacaaggcccgtccgtcacacgttttgaagtgcatcctgagcccggagtgaaagtaaacaaaattacaaacttagcagatgatattaaactgagcctgtctgccaaggatattcggattgaggcgccgatccccggtaaaaacacgatcggcattgaagttccgaaccgcgtaagcaaagtcgtcgatttaaggcagatgatcagaagcgccgctttcaggacgaatccgtctccgcttacagccgcgctcggtgtcgatatttccggaaacccggtcgtcattgatttgaaaaagatgccgcacgggttgatagcgggtgcgacaggatcgggaaaaagcgtctgcatcaataccattttggtcagtctgctttataaggcggatccgagtgatgtcaaaatgcttctgattgatccgaaaatggtcgagcttgcgccttataaccaaattccgcatttggtcagccccgtcatcacggacgccaaagccgcgaccgccgcgttaaaatgggttgtggaagagatggaacggcggtatgaactgtttgcccattcgggtgtgagagatatcggacgctttaatgaattaacggccgatcataagacaggcgaaaagctcccttacctcgtagtggtcattgatgagcttgccgatttaatgatggtcgcgccgaacgatgtggaagaaagcatcgccagaatcgcgcagaaagcgagagcctgcggcattcatctgcttgtcgcgacacagcgtccgtctgtcgatgtcattaccggaatgatcaaggcgaacataccgacgaggattgcattctccgtctcaagccaggtagattccagaacgatcatcgacatggcgggagcggaaaagctgctcggaaaaggcgacatgctgtactgggaaaacggtaccggaaaaccggtgcgcctgcagggcaactttgtatccgacagagagattgaccgcgtcgtctctcatgtcagaaagcagctgccgccttcttatttgtttgaacaggaagaactgatcaggcagggaaccgcccttaaggaagaagacgaactgtttcctgaggcgtgccaattcgtcgtggagcaaaacagcgccagcacctcaagccttcaaagaaggttcagaatcggttataaccgcgccgcgaggctgattgacatgatggaagccgaaggcatgatctcagaagcgaagggcagcaaaccgcgtgaagtgctgattacggccgctgacatttctcaagaataagaatatcgttcatttttctcacaaacatggtatgatagtggatggaccatcaaaactgcatcactgtcacgcgctgaaatatcatgcggcaggtttaatcaaaaagaaagttacagatactgacgataacgtaaaaataaatggaagcgccgctgtgcgggcttttcgcccgctgcggtcgcaaaatgaaatgagcgtcatatactggggaacagatagacgtttgttggaggtacgattatgactgtttatcattttgttggaataaaagggacaggtatgagcccgcttgctcaaatcctgcatgatacggggtatcaggtgcagggatcggatatcgagaagcagattttcactcaggctgcccttgaaaaaagaaatatcccgatctatccgttcagcgccgataacatcaaacccggcttaacggtaatcgccggaaacgcattccctgattctcatccggaaattgcaaaggcgctcgatgaagggattcctgtcatcagatatcataaatttttagctgaatatatgaaaaaatacacaagtgtcgcggtaacgggcgcacacggcaagacgtccacaacgggcctcttggcacacgtgatgcagcaggcgaagccgacttcgtttcttatcggggacggaacgggcagaggaaatgaaagcagcgaatactttgtatttgaagcttgcgagtaccgccgtcatttcttaagctatcagcctgattatgcgattatgacgaatattgattttgaccaccctgattatttcgccaacattgacgatgtgtttgatgctttccaaaacatggcgcttcaagtcaacaaaggcatcattgcctgcggtgatgacgagtacctgccgaaaattcacgccaatgtgcctgtcgtttattacggcacgggagaagaaaacgattttcaagcgagaaacatcgtaaaaaatacggaaggcacgacatttgacgtctttgtccgcaatacgttttacgatacgttctacatcccggcatacggccatcataatgtcctcaattccttagcggtcattgcgctctgccactatgaagaaatagacgtgaacatgattaagctcggacttgaatcattcggcggcgtcaaacgcagattcaatgaaaaagtgatcggcagccaggtactgatcgacgactacgcccaccatccgactgaaatcaaagtcacgattgaggcggcgcgccaaaaatatcccgaacgtgaaatcatcgcggtatttcagccgcatacgtttacacggacgcaatcattcctggatgaattcgcagaaagcttaagcgcggccgaccgcgtgtatctgtgcgacattttcggctctgcccgtgagaacgtcggcaagctcacgatcacggatcttcaggaaaaaatcgataacgcagaactcattgaagaaaatgacacttccgtgttaaaagcgcatgaaggcgcagtactgatcttcatgggcgccggagacattcaaaaatatatgagggcctatgaaaacgtcatagcgtaacgaaaaagcagtggggctctcactgcttttttgcgcgtgctgcaaagggatttaccgataaacggagaaatagtatacatacagacctttcatatatgtttatcattttaagaattgggtatataccactatatcctgcattaaggaggtattagatgatcatcattctttacttaagcgtcgcactcattgccgttgcatttctcatcctcgtcatctatctgtccaaaacattaaagtccgtgcagatgactttaacaaacgtagcctcgactttagacggccttgaagggcagatgaaaggcattaccgcagagacaaccgagctgttacataagacaaaccgtctcgcggaagacattcaggaaaaatcagagaaattaaatacggttgtccatgctgtccaggaagtgggaacttccgtccagcagtttaatacatccataaagcaggcagcaggttctgttacggcctctgtaagagagaatcaggataagatcagtcaggttgtcacctggagccaggccgctatggaaatatgggacaagtggaagcaaaagaaaaaaacatcgctttaatcataagaaaaatccactaaggaggaatcataatgagcaaagatggaatcaatagtaaggattttttaatcggaacgctgatcgggggaattatcggcgcgacaacggcgttgtttctggcgcctaaatcaggtaaggagctgcgcgacgatctcggcagtcaggcttctgcgttaaaggataagacggacagaatgacggccgacgcgaaagaaaaaggctctcaatatgtcagcatcgccaaggacaaaacatctaatatcacccagctggtagctgatcagtcaggtcagattatgaataaagtgaaggatttaaaagaccgttctaagagcacactaaccgagaaagccgaagagacgagaagcgaaatgcaggacacggcccaaagcatcaaggccgaagcggaagacgccggggaaaaagccggtcaggcaaatcgctgatcttcaataaggagagataaccgacatgacaaaacagctgatatcgtctgaagaagagttcaaaaatgccgctgagaaagaaaacacgctcgtgtttttaaaacacagcacaacctgcccgatcagccaagccgcgtttcaggagtttgacgcctttgcatcggagcattcagaagtaccttcttattacctgcatgtgcaggacagccggccgctttcaaactatatcgccgaggcatacggcgtgaaacatgaaagcccgcaagtattcgttattacaaacggcgaagtgaaatggcacgcgtctcattcacaaatcacaaaaaacgcaatagagcagcacctttcataattgctggccgccggttgataccggcggtttttttttgaaaaaaactattgatcatttcagccggatcatgtaggatatcaatatatactgcttcaacgcataaaagcttaaaagcgtttttgtgataaagtcgaatgtgaaaaaatttattatttcatattcctattttcgcataactgtagtaagatgcatgttaaccattaaaataaaacatagcatagaagggatgaaaaagatgagcaacaaggaattagagagtctaagacagcaggcagacgcactaaacttagaaatccttaaattaatcaatgaacgcggagccgttgtaaaagaaatcggtaaagcaaaggaagcacagggtgtcaaccgatttgaccctgtcagagagcgtacaatgcttaaccgcattattgaaagcaatgacggcccatttgaaaactcaacgatccagcatattttcaaagaaattttcaaagccggacttgaacttcaagaagaggatcacagcaaagcgttgctcgtctcccggaagaaaaaagcagaagatacgatcgttgacattaaaggtgaaaaaatcggtgacggcgatcagagattcatcgtcggaccttgtgccgtagaaagctatgagcaggttgccgaagtcgcggccgcagcgaaaaaacaaggcattaaaatcctgcgcgggggcgcgtttaaaccccgcacaagtccgtatgatttccaaggtctcggcgtagaaggcctgcaaattcttaaacgcgtcgctgatgaatatgacctcgcggtgatcagtgaaatcgtaacgcccgcccacattgagcaagcgattgattacattgacgtcattcagatcggcgcgcggaacatgcaaaactttgaattgctgaaagccgccggttccgttaaaaagccggtattgttaaaacgcggtcttgccgcaacaatttcagagttcatcaatgcagctgaatacatcatgtcacaaggaaacgaccaaatcattctttgtgagcgcggaatcagaacgtacgaaacggcaacgagaaacacactcgacatttctgccgtgccgattttgaaacaggaaactcacttgccggtgtttgttgacgtcacacactcaacaggccgccgcgatctcctgcttccgacagcaaaagcggcgcttgcgatcggcgctgacggcgtgatggccgaagtacaccctgatccttccgttgccctttcagactctgcgcagcagatggatatccctgaattcgagaaatggctgaacgaattaaagccgatgctgaaagtaaaagcataatacaacgttccgctctttaaaggccgcctcgcgcggcttttttttcgtatcttcattttatttaattataaaatgaaagtgaacgttttcatcattgggaaaaacgtgtataatttcatgagagatatttaaatttgatgaataatgaaaaataatgtacactactgacttacgcttacaatcataaacgacagaatgcgaaatcgtacgacatttctttacataaagtgtttatgctatagataaggataagtgtatccagtaaaaggagtggtttcagtgagcaacattacgatatacgatgtggccagagaagcaaatgtcagtatggcgactgtttcccgcgtcgtgaacggcaacccgaatgtaaaaccgacgaccagaaaaaaagtattggaagccattgaccggctcggctaccgcccgaacgcggtggcaagagggcttgcaagcaaaaaaacgacaacggtcggcgtcatcatccctgatatctcaagcattttctactcggaacttgcgcgtggaattgaagatatcgcgacgatgtacaaatataatattatcttaagcaactcggatcaaaatcttgagaaagaactgcatctgttaaatacgatgctcggcaaacaagtggacggtatcgtatttatgggcggcaacattacggacgagcatgtcgaagaatttaagcgctctcctgtgccgatcgtcttggctgcatcagtggaagaacagggcgagacgccttctgtcgccattgattatgaacaggcgatttatgatgccgttaagcttttcattgataaagggcatcgcgatattgcattcgtctccggaccgatgcaagagccgatcaaccgttcgaaaaaactgcaagggtacaaacgggcgcttgaagaagcggcgattccgtttaacgagcaattcgtagcggaaggcgattacacttatgattccggtatggaggcgcttcaaagcttgatgggccttgaccggaaaccgacggcgattctttctgcgacggatgaaatggccctcggcattatccatgcggcccaagatcaaggtctttcgatacctgatgatcttgatattatcggttttgacaatacgagattgagcctgatggtccgccctcagctttcaacagtcgtgcagcctacgtacgatatcggcgccgtggcgatgagacttttgacaaaactgatgaacaaagagccggttgaagagcatatcgtcgaattgcctcaccgcatcgaattaagacaatcaaccaagtcataaaaaaacggaaaagcaagcttcactctgaggggtggaatcttgcttttttacttgagtaaggagaagatatgaaacgttttgattatctgacgcccgttggctttatgttaggctgtattattgtcgcaatcggtattctgtcagggacgggactggcgggaatcagttcatttttggatctgacttcttttttaatcgtcacaggcggccttgccgcggcggtctttatcagctttccgccgagggatttaaagaaaaccccttctgttctgaaacaggtattctcccgtcaggatgacaatgtgaaagagcttgtcagagtatttgtcagcctttcggagcaggcgcgcaggcaggggctgctgtctctggatgaccaggcgcgggagatcaaggatccgtttttaaaaaaagggcttttgcttgcgattgacggctgggacgaggaaacgatccggctggtgatggattctgagatcgccgcaatggaagaaagacacagaaaaggaagacgcgtttttgaaaaagctggtgatttcgcacccgcctggggaatgatcgggacgctcgtcggactcgttctcatgctcaaaaacttaaatgacccgcataccctcggaccgaacatggccgttgcgctattgacgacgctgtacggagcgctgcttgccaatttggtgtttatcccaatcgcggcaaagcttgaagaaaaaacggaaagtgaaattttcatcaaacaggtcatgatcgaaggggttgtcggcatccaatcgggcaaaaatccccgcaacctcgaaagtcagctcgtcgtcttcagctcaagagaagactggcgtaaaggacagcctgcgaacaagaaaaagggcgctgtccatgaagcttagaaaagagcgttttgaaagaagaaacaaaccggaacattccggcggttcaccgagatggatggtgacgttcgctgacttgatcacgctcattctcgtgttctttatcttgcttttttcgatgtcgcaaatagacgcggaaaaatttcaatctgccgtttcatcgattcatacaaacggcagcggaggtgaaccggcgtcatcagacaaagcaaacgaaaataaagaacaggatttgctgttacaaaacgtgaagacatacataaaagcgcatcatttgagttccaaattgacggcgaagcgcgatgagcgcggagtggttcttgtgctgcaggaggccgttctgtttcagacgggaaaagcggatgtgctgaaaaacgccgagccggttctgcatcagatcgcggtgcttttaaaaacaattccgaatgacatacaggtagaaggccatacggacagccgccggatttccacctatcaattcccgtcgaactgggagctgtcgtctgcaagagcggcgagtgtgatccagtattttaccgcgaatgaagacttttccgccaaacggtttatctctgccgggtatgcggatacgaaacctgtgaaggacaacaaaagtcccggacatatgaaagaaaaccgccgtgtagaaatcgtgatcaaaaaaacgacctcctcataaggtcgttttttattttgttttataccgctgctcagaccggatggcaaaaagtgctttttccacggtttgggcatttttttctgaaatttcttctttgcgtggaatcggaggatataattgttcaggatcactccaaaaagcgggcagcgtgcagggggaatgcttctgccatttatcaatccatttctgcggtatgcgctccccgggatcaatccctttcatctcaagccaaatgcggctccatgctctcgggacgactctccaaatatcgtatccgccgccgccgaccgcgatccatctgccgctgcaatattgatgggctaatgaatgagcgagccgcgggatctcctgataaatggagattgtattggacaggtgtgtcaatgggtcgtaataatgggcgtccgcaccgttttgggtaagaatcacatccggcttaaaaaaagccgcaatttcagaggcggccgttttgtaagcgtggagaaaggaatcgtcctctgtgaaagcgtccagcggaatgttaaaagaatagccgtagccttgcccgcttcctttttccagtacttgtcccgtcccgggaaataaataacgcccggtctcgtgaaaagaaacagtgcagacatcagacctgtcgtaaaacgtaaattgaacgccgtcgccgtggtgggcgtctgtatcaatgtataacacttttgccccgtagttcttctggatgtattggatggccacggcgctgtcattatagatacaaaagcctgacgccctgccgcggaagccgtggtgaaggcctcctcctaaattgcaggcatgcctggcttgtcccgtcatgacataatctgccgccgttaaggtgccgcccaccagaagcgacgcagcttcatgcatgccggcaaaaacgggggtgtcttccgttccgagaccgtagctttctccttctgcggcagggagccggcccgcacccgcaagttccaccgcctgtatataatcctccgtatgaacgagagccagctcttctttagtggccgtgcgcggtttgacgatgtctccatcgtcaaacgcgtccgccgcctgaagcagatcgtatgttaaaagcacgcgctgctgattgaacggatgatcctgatgaaattgatacgtctgataagaaggcgagtaaacaaaaacgctgtctctcatggctgatccctcaaatgtttcggccataagacattgtatccggcttcatgaacggcacggataaaagggagcggattcatcgtcttcacccggaagacgagaatgttcgacccggcggaatcatggggatagacgagcacactcaggatttgcagctgaagatcacggcacatgcagctgagatcagcaaggctttttgtcatatccgtcaccaggatttccacctgtgatcccggctgggccgcgcctgtcaggctgacgaaagtccggagcacgtcggttttcgttaaaatgcccgtcagcttatgatttaccgtaatcggcagacagccgatgccgtgctcataaaaggaagcggatatttcttccacaaagtcaagcggatgggcgcagatgacattccgcttcataatggtctccactttgtttgtcagaaacgcgccgcgttccttttgttcgaagctgccggggccggcctgtttaatgtctctgtctgtgacaataccggtgacgtgcagctcgtcgtcgatgacagggagatggcggatatgatataccttcattttacggacggctgtttcaatggagtcgtgttttgagacggtgatgacgtcccgtttcatgatttgttctgcaatcatctttttatcccctttgtatgtcagtcaatacataaaccgctgataaaaacgaagcctgtcgaactgttcaattgactcctgactgacgtgcctgccgatgcgggccatcagacaattggccggatgagagctgatttccggttcatccgttgcaaaccagacaagacccccggcattcatcatcttttccatgatctttctgtattcccacacatcttttttcattccttttaaatcccaatgccagtaatattccgtcgtcatgatgatgtagcgttccatctgttcatccatcatgctgactgtcagcaacgtttttccgacagaacagccctgtagccgggagcgacctcgatcgccccgagctcaaggagatcttccatattgccgtcagaccaccgttcaagcggatcaggatataaatacgtcacatagccgataatcgtctgtccgtccctggcgataatgatccgaccttcaggaagcccggcgatctcgattaacgctttgtgctgttcatgaggaaggcgaaaggctgtcaggccttcatgaaactcatactgtgctaggtcctttggaggaacgggcccttctaccaatagagggccggctgctgtctgaattgatgaagaatggtacgttttatgatgtttcactgattcaccgcctgtcggttcttaataaaaacacatctctcttaagcataacaaaatataaagcgttttcaatagtgttgtaatttatattttaaaaattgagaaaactgtgaacatctactataattagtctatagataagcaaagggggatgttgcatgaatttgaaagcgttgccggcggaaaaggggaattatcatctgcgaaattatgaggaaacgtaccgcagcttcgattggaaagaggtcgaagcggagttttcctggcatcagacggggaagctgaatgcggcgtacgaagcaattgaccgtcatgccgaatcatttcgaaaaaacaaagtagcgctgtattacaaggacgcaaatcggaatgaaaaatacacatttaaagaaatgatggaggaatcgaaccgggcgggaaatgtactgagacggtatggaaacgtggaaaaaggggaccgcgtttttattttcatgccgcgttcgccggagctgtactttatcatgctcggcgcaattaaaatcggtgcgatcgccggccctttatttgaagcgtttatggaaggcgccgtcaaagaccgcctgttgaacagccaggcaaaggttgtcgtgacgacacctgaactggccgaacggattccggcggacagcctgcccgacctcgagcatattttcattgtcggcggcagcaaagaagcgggagataaaatcattcattatgataaagcggctgagggagaaagcacgagacttgatattgaatggatggacagaagagacggctacctgcttcactacacatcaggatctaccggaacgcccaaaggtgtgctccacgttcatgaagccatgattcagcaataccagaccggcaagtgggtgcttgatcttaaagaagacgatatttattggtgcactgcggacccgggctgggtgaccgggacggtgtacgggatatttgcgccgtggctgaacggagcggcgaatgtgatcgtcggcggcagattcagtccggaaaactggtacggcacgattgagaagctcggtgtcagtgtctggtacagcgctccgacggctttcagaatgcttatgggcgccggagatgaaatggcatccaaatttgaccttacttcacttcgtcacgtcctgagtgtcggagaacctttgaaccccgaggtcatcaagtggggacataaagtattcggcaagcgcatccacgacacgtggtggatgacagaaacgggcggacagctcatctgcaattatccttgcatggagatcaagccgggctcaatggggaaaccgattccgggagtggaagcggcgatcgttgacaatcagggaaatgagcttccgccgtaccgaatgggaaatctcgccattaaaaagggctggccgtcgatgatggattccatttggaacaacaaagagaaatatgattcttattttatgccgggcggctggtatgtttccggagattctgcttatatggatgaagacggttatttttggttccaaggcagagtcgatgatgtcatcatgacatccggcgagcgcgtcggcccgtttgaagtcgaaagcaaacttgttgaacatccggcgattgccgaagccggcgtcatcggaaagccggaccctgtccggggagaaattattaaagcgtttatcgcgctcagagaagggcatgagccatccgatcagctgaaggaggacattcgcctctttgtaaaacaggggcttgccgcgcatgccgcaccgcgggaaattgaattcaaagataaacttccgaaaacacggagcggaaaaatcatgagacgtgtgctgaaggcatgggagctgaacctgccggcaggcgacctgtccacaatggaagattaaagacggcgttgacatcgtatcttatttatgttaaaaatgagtaagcttcatacgaaaaggttttgattgagacaagtaggatatctgattgttccagagagctgatggccggtgaaaatcagcacataagatatgccgaatacactcatgaaccgcttttgcgaacaaagctattccaaggctttcagtagtgaaagaacggacacggtccgttatcaaaaagagtgataaaagcttttttatgtttttattagtagggtggtaccgcgattatatcgtcccttcgttttaaacgaaggggcgttttttattttcataaacaaaggagcagacaaaatgactaacttattagaggatttatcattccgcggcttaatccagcaaatgacggatgaagaaggactgaataaacagctgagcgaagaaaaaatccgtttatactcagggtttgacccgacggctgacagcctgcacatcggacaccttctgccgatattgacactgcgccgtttccagcttgcaggccaccatccgattgcgcttgtaggcggcgcgacgggactgatcggcgatccgagcggcaaaaaagcggagcgtacgttaaatactcaggatatcgttgtcgaatggtcgcaaaaaattaaaaatcagctttcccgatttttagatttcgaggcaggagaaaaccccgctgtcatagcgaacaactttgattggatcggaaagctgagcatcattgaatttctccgtgacgtcggaaagaacttcggaattaactacatgcttgcgaaagatactgtaagctcaagaattgaaaccggaatttcttacacggaattcagctacatgatcctgcaatcctacgattttctgaatctgtacagagaaaagaactgcaaactccaaatcggaggcagtgaccagtggggcaacatcacggccggtcttgaactgatcagaaaatcagaagaagaaggggcgaaagctttcggtcttaccattccgctcgtcacaaaagctgacggcacgaaattcggcaaaacggaaggcggcgccatttggcttgataaagaaaaaacatcgccgtacgaattctaccagttctggatcaatactgatgaccgcgacgtcgtcaaatacttaaaatactttactttcttgtcaaaagaggaaattgaagcttatgctgaaaaaacggagacagctcctgagaaaagagaagcgcagaaacgtctcgctgaagaggtgacggttcttgtacacggccgtgaagcgcttgagcaggccgttcatatctcccaggcgctgttcagcggcaatattaaagagctttccgctcaagacgtcaaggtaggatttaaagatgtaccttcgtttgaaaaagaccgctctcaagaactgtctttagtagacgtgctagtggaatctaaactgtcgccttcaaaacggcaggcccgcgaagacattcaaaacggagctgtttacattaacggcgagcgccagacggacatcgggcatcttctgactgcggaagaccgcattgaagatcaatttaccgtactgcgccgcggaaagaaaaaatacttcctgatcacgtactgaaaataaaaagcagtccggccgctccatgcggcaggctgcttttttatgttttgtgaatactgcacggggaaatgagtacagtacatagtataagcaaaacagggaaggggtgctgcgccgtgaatttcatgtttaccatcgccaaagaaagattgcagcgggatcattgggaacagcagcaaagcataaacgccgaagccgaggaatcagagacggaagaagaaaatccgacatcataaaggtaaagcctccattctatggaatggaggcttttgattgtcaccatatcagcctgacggcggccatcagcacgactcccgtgatgaccgtgatggataagctttttgtcagcatcgcgcaaagcaatgtcgggatgagaacgatcattgctttccaatcaaaggtcaaagcgctgtttgttttcacaatcatgttttccgttaccagagccgtcaaaatgcaaagcggaataaaggagagccattttaaagccaattcaggcatctgaatgttccggacaaatataaacggaacaatgcgcggcacaagtgtaacaatcatgcagccgagtataatccagatcatttgtgtgctgatgctcatttgtccgtcaccaccccgatcgttgccacaattacggttgagacgatgaccgcgatgtgtgacgggacgaaatacgataacaagaccataaaaatgatcatatagagaattaaggagaggctgtgcttcagcttttccgaagcggacgactgcaattgcagcacaagcagcgccgcaaacatagcgggcaaagcaaagtccaggccgagagcgtaaggatcagatatccattgtccgagaagcccgcccatcacgcaggaaataacccagcacatgtaagcggttatattgaggccgttcatccacttatcgtataacctgccgttctgagccgctttgttcaccgctactccgaaagattcgtcagtaagcagagccccgaagccgatatttttcgccagagagtatttcgtgaaatacggcgcgatggtcaggctcagcagaaggtgacgcagattgacgataaacgtcgttaaaataatggcggaaatcggactcccggaaacaaggagcgagcaaataataaattgggcggcgccggcatagacacacaaggataacaaacagatttcaagaatgcttagatgagaggcaaccccgacgatgccgaaagcaaaaccgatgctcatatagcccagcagcgtaggcacacaatcccgcaccccctgtaaaaacgtatcgttcatttcccgggaaacggcggttttttgcacttctgtattaatcattttttatactcctttcatagagattataatgataacgactaatgaaaaaatcaaagaaaatacggttcacatttatatgaaccgatttccggtgacgacatgaaataacgaatggttttgtttcatcaggccttcaactttttcagccccgacttctttcacaagctctgcgaacatcagatcgtgcctcatatattccatggccacgagaacgagagcggggtcttctgatttaatggcccaggcattcgtctgcggagaaaaattggcgattaagacttctttattatctcgggcagctatcgttaatcttccgcccatccgtttctccgccacttcaggagacatattatgatttgtcgtatttccgagcttcacttccggagggccgaacacaatcgaaaagacgggcaattgttcggcggcgcgtttattagcggcttcttgaataaagggaatctgctgttcccagacagacagccacaactcttcctcggctttttcaatcatttccttcatctcattgatgacatgatcatttgtgctgatgcggcggatgacattcatctcctgctcgctttccagcgccaataacttttcctcaaggtagccgaatgagctctcgaaatcgtgccggagccggtcgattaattcctttccggccagcggggcatatgtaaccggatcagacggcacaatatggacagcgcctttatcaactaatttccccaatacctcatagatcattgagcgggggacgcctgaccttttgctgatttcatatccggtaacaggcgagtgtttcaacaagccgatatatgctttacattcatattgagaaaatccaaacttctgtaattctttcagaacatcatccataaacatcctccgtagtggttattcatgaaactactataatgtaagcggttatatcttgtcaatgggacttgagtgctgaaagaaaggttcgcctgttttgtcgctttccaacttagtttatgatgagttacatgtatggcttttgtgaaaaacgttgccgtagacccacacgaatgccgtttgatacgataaatacaagaagtcaaaaagaggaggatcacggtggaaaacacctctaaaatcgcttttttatcggttataagcaattccctggtcgtcatgctcaaaatagtggtggggataataaccggatctgtcgcgatactttcagaagccattcattcttttttagatttgatcgccgccttcatcgcctttatctccgtcaggatttcaaaaaagccggctgatacagggcatccgtacggtcatggaaaagtcgagaatctgtcggggaccatcgagacgatgctgatttttgcggcagggatttggatgatatatgaatgcgttcaaaaactggtcaacccggctccggttcatctgcccgtattgggaatcgttgtgatgcttgcgggggctctcattaatttgatcgtttcgaagttcgtaaaaagagaagccgaaaaggttaattccgtggcaatgaaatcgaatgccctgcatttactgactgacgtgtacacatcattaggcgtagcggcaagccttttggtcgttaccttaacggagtggtacatacttgatcctattataggtatggtgctggcggtgtatatcatatatgaagcgtttaagttaatgaaagaagcattcccgccgctgattgatacccgtttgtcggaagaggaagaaaaaacaattttaaagattatcgaaacatttcaacaggaatttattgaaattcacgattttcgtacaagacgctccggcccgcaggagtatattgattttcacttggtcgtagcctctcacgtggcgattaaagacgtgcacgacctgtgtgaccgcattgaaagagctattacgaatgaattcaaacaagcacaggtaatgattcaccccgagccggagagcgagaggaagaaataaatcgatcttaagtttgcgtttgttccctgcaaaatgcctgcaaaaggcccgtttccacgggtctttttgttgtataaatgactatttctcgctcatatgagagagaagcttatacacgtgaggggtacatttcatacgttatgttgtaaagaaaaagggaggtgaacagaattgaacgctatttctgttaaagaaattgaacatggagttgccgttgcggaaagagaaggtttaggggagtatttataccaagaaccggtttccaaaaaatgttcgcgccgttcccgcagcagaaaacggacacaccgttcccgcagcagaagacggagtcatcaccggacacaccgctcccgcagcagaagacggacccatcaccggacacaccgttcccgcagcagaagacggacgcatcaccggacacaccgttcccgcagcagaagacggacgcatcgccggacacaccgttcccgcagcagacggtcacatcaaaaacgtacccgcaagcgctgttttaaatgctgaagcagactctattacaagtaatggagatctgctataatggcaagagaactgcataaaagatccggtatcatcatctgcggacactgaactgacaacatggcgctgtttgttcgtgtccgttttttatgtcaaaaaagatgccggaggataaaaaggaagggatgacgccgaatgaagctgaatgaggaattttataactctgaaggaaagacagtctcttcgcaaaacataagcagcaagcttttgcatatcacggacagcgggcatatcagcattgacttcatcagcataagcaggctgcggaaggcttcaaaaatcgcgatcttaggtgacagcgtcgcccgggggctgcgcgcggaatacggctttggtgacattctgaaagaccggacagacgctgaaataaccaatctgtctgtcagcggcgttaatatgagcaaccacggaagcgataacatttatcagcaagcgcttaaaacaaagggacatgatgtcatcattgtccagggaacagatgatgattggtgcaaccacattcccatcggcacagatgaaaaggatatcaccacattttacggaggcttctgtcaagtgattcagcagctgcgaagcggaaataaaggcgcgagcaccattgtggtgaccccaacgagacaagcaaaaatatcaaaaggaaaaatcgtccgccgtgatactgataaaaataaactgggcctgaagctggctgactatgtgaaagcccaaaaagaagcctgcacactcctctctgtaccgtatgccgacctgtttgatacagatctcatcgacccgtataatcccgctttccgcagcatgtgcatgtcagaaggtcttcatccgaacgagaaagggcatcaaatcatttttcaggaaatctgccggaattattattactattacgggtaacacagcgctgcatgattattttcggccttgcttttctaaaagctcaattattctttgagatgcgtgtttttgcgctctcaaaagcgaaatgatattaccggtaaaaccgattaaaatgatcagcagcaaaatgatcatccacataagtgaacctcccgtcgagtgttgaaaaacccactctttattttacttattatggatggggaagagaataggtctaactattggtgtttctttatcaatccataaaaaaatgcacagactgaacgggtctgtgcatttttattcgcttatttcagcaggttcaatgattcacgattaaaggcttccaaatcgtcaggcgttctgctcgttacgatgttatggctcacgatgacttcttcatctttataatgtgcgccggcattgattaagtctttgcggatgctgcggaatcccgtgatatcttttcctttaagaaggtcggtatcaatcagcagctgcgggccgtggcagatcgcgaaaacgggtttctgattttccacgaatgatttagtgaattcacccgggcggtcatctccccgcagaagatctggtgaaaagcctccgggaatcaataacgcatcgaattccttggggtctgcgtctgagatcgcttgatcgatctttactttctcaccgtgcttgcccgtcacttctttccctgcttctaaatctattgtcaccacactgtggcccgcttctttaaatgcttccgccgggcttgtatattcaatatcctcaaattgatctgtcatcagaactgcgatttttttgctcatcatcatgcctcctgtgaatttgtatatgacaagaatatcaggcggattgccgcctcacaacgtatttgcttgaagatacggcatgaaaaaagacccctctgaaaaagaggagccaaaaggtacggaggtctgctgaggcaagaaatcgaaccaattactttttgcgtctttttttatcctttttacacccgcatttccccggatcgcccggatcaatgacttcgtgaattgtttcttcctgataaacgtggcggggaacataacggatatgttctctgttaatgtgtttgatgggatggacgtaaaccacttctttgtcagtatacttgtcagtcacaatatacttagggtcacagtaatacactttcgattttttacccattcatctcacctcccgtactttattaaatgctgaaaaggaggattttgcatcggacaagtacactatggcaagtccacaattttccatccgcaatttcgtttatctggtttttcctgaatccgtctcaaattggaatggctaaccctttttgaacggggaaatctataaaaaagaattcaaaaacgattcttttttcaggtcaatcgagatgcatacatctttagggggatttcagaatgctcgatgaaaaaacgattgaaatcattaaaagcacagtgccggtcttagaagagcatggtgaagaaatcacaggccgattttatgacctgctttttcagcatcaccctgagctgctgaatatctttaatcagacgaatcaaaagaaaaaaacacagcgtacggccttgtcgaatgctgtgattgcggccgcagccaatattgaccggctggaaaacatagtccccgtcgtcaaacaaatcagccataagcaccggagtatcggtgttaagcccgagcattatccaatcgttggaaagtacttgttaatcgcgataaaggatgtgctaaaagacggggctgctcctgaggtcattcaggcatgggaaaaagcatacggcgtcattgcagacgcttttatcggaattgagaaggacatgtataaacaagcggaaacgcaaaaaggcggctggaaagacgataaggcgtttaaaattgataaaaaggtaaaagaaagcaaagagataacgtcgttttatttaaaaccggaagacggacaagttctccccgaattcaaagcgggacagtatatcagtgtaaaagtatacattccggacacgggttatacgcatatccgccagtacagtttgtcggatgtatccggtaaggattattaccggatttccgtgaaaaaagacggaattgtttcttcatatctgcatgaccaattacacgaaaaggattcaattgagatcagcgctccggccggggatttcgtattagaccctgattccaaaaagaatctggttctcatcagtgccggtgtcggaattaccccgatgatcagcatgttaaagacggttgccaaaacccagccgcagcgaaacgttctctttatccatgcggcaaggagcggagagtatcatgcgctgcggcatgaagctgaagaagccgcggaacactcatccgctgacaccgtctttatttacagcgaaccgtccgaacaagaccgttcagaaaacattcgttttcgggaaggccggattgacaaacagctgttagaagaagtgatgacagataaagatgctgatttttacctgtgcggatccccgtcgttcattaaagaaatgaaaaagctgatttctgaattcaatataacgccggaatccattcactatgaattatttaaaccgcagctgagtatggtgtgatgtaacaacatcttagacagtctgtttaacagactgtctttatatgtttaatacgaaaggttttccccataacatagaattttcaagcaggtaaatcatattcaaagtcgtattatcctaaaaagacaaagttttttatgtcccaacatacttcagtagccggatggaaaggttctcttcctgatacttcaactggaacattggctcctgctcttgtgaataaaatagcaatgctctaataataagaggtggctcaatggcagtttttgttgaaaaaacgctccaaggtctaaaagaattaattgatgaaaaaggccgcttgaacattttagggaatgaaggaacgcttttagaaacagaatgtactttctttaaaggtgcaacagatctggagattgagagttttgagaagaaaataaaagtctcacttcctgaagattataaaacctttttaaaattgcataacggagccagaatatttgatttgttgatttacggtgagaatgtaggtgggggtttgcatattcttgatttagaagagattgaaaagtatatgcaaaatggttttttagagcctcagtttattcctgtcgcacatctgttagacggatgttatttgttaattgacaaaaccaaaatttctacagatccaaactatttatggttccgcggatttattgagtatgaaccaatgaaacttaattttgagatatttttagatcggtatattttgtgtcaaggagcaaatttttgggagtggaatatctataccgctgaaaattattataggactcaccagggtgataaggattaacctttcctacagttgggttggttcatttttgcggttagacttcgatttgaacttttaaaaataggtttaatttgggagacgaaccgattaattggtgtatagatgatttataaaaagcgcagatactctgcgcttttttatttaagtattttccggatcattcgcagcccgtttttggaagaaggataacggaaagcgaggtcgaagcggttcgtttgtttgacgacgctttttttgtgcgtaaatgcgttaaagctgttaaatccgtgatagctgccgatgccgctttctccgacgccgccgaatggcaaatacggtgtcgcgacgtgcattaacgtatcattgacacagccgccgccaaatgacagattctctaaaacagttcgctcgattcctttgtttgttgtgaagacataaagagcgagcggctttgggcgtgattggactttctcgatgacttcatcgatatcgccgtatgtaaacagcggaagaatcggcccgaaaatctcctcctgcattactggagagtcatccttcacttgatctagaatcgtcggcgctattttgtggtgttcaggattaaattgtccgcctgtaagcgggacgccatcattcagaaagctgagcagccgctgatagtggcgttcactgacgattttgccgtactgcggattttgttcaggctgagggccgtaaaattcactgatcgcatgcttcatttcttctatgagcttcgttttgatatcttggtggacaactaaataatccggtgcgatgcaggtttgccctgcatttgtaaatttcccgaagacgatgcgtttggcggcaagctgtatatcagcatccttatggacaatgcagggacttttgccgccgagctccaaggtaacgggaattaattgtttggaggcggcctccataacgatttttcccacggcaacgcttcctgtgaagaaaatatagtcaaagggctgctgtaataaaacagtgctgacgtcgggcccgccctccgccatagcgacataatcactcggaaaaacgctgctgataagtttagaaagaacagcggaaaccgcaggcgtatattctgacggtttgagaacgactgtgtttccggccgcaatggctccaatcaagggtgaaagcgccagctgcaagggataattccaaggcgcaatcaccaaaacgattccatatggctcagggataatcatgcttttcgagcccaggtgagtcagaggcgttttgactcgcttcggtttgacccattttctcagccgcttcatcacaaaactgatttcttccagaacaattccgatttctgtcgtgtacgcctcctgttcggatttgtggagatcctgatagagagcggctgctatatcggcttcttgtgttttgatggcttgtttcagcttttgcaatatgttcagccttgattctagcggtctcgtatgccccgccgcaaaataggctttgtgcttgctgacgatagaggggatgctgttcattccgtctctcctttttgtaagtatgatgattcattatgtaaaaaatcgcttctgcctgtcaaatgattaaggtgagtcagaaaaaataacaaactcatttctgcgtttcggcaggaatttgatgaaaaagagaattctttttgcggcattatctgttgcaggcattatggggttttctaatgtacatgtagttgaaaagccggttggcacataaaaaaaagccccggacaggggcttttttaataaagagagggaacagcccaaaagaaaaaccccggaaacattgtcatcacaacatgtccggggtttaatccaatgctctttaaagagcgttttacttaacgggagtagaactcaacgataagcgcttcgttaatttccggagcaagctcagagcgctctggaagacgagtgaatgtaccttcaagcttttcagcgtcgaaagtaaggtactcaggaacgaagttgtttacttctacagattctttgatgatagaaaggtttcttgatttttcgcgaacaccgattgtttgaccaggttttacttggtaagacggaatgtcaacgcggcttccgtcaacaaggatgtgaccgtggttaactaattggcgagcttgacggcgagtgcgtgcaagaccgagcttgtacacaacgttatcaagacgtgcatctaaaagaatcatgaagttttcgccgtgtttaccagtcatttttgccgctttgtcaaacaatgtgcggaattgacgttcgtttacaccgtacatgtgacgaagtttttgcttttcttgcaattgcaaaccgtattctgatagttttttacgctgtcccggaccgtggggacctggtgcgtaagggcgtttttctaattctttacctgtaccgctaagagagattcctaaacggcgggacagtttccaagatggacctgtatagcgagccataatgtgactcctcctttggttttattttgtggaaaataaaaaccgtctgttcgatccgaccgtgcacattttgttttcatgtatcctcgctccagcagcagagagttacacgatacaccttacagctaaggaacaaaatgcaaacacagaagctgaacaaaaaggctgcaatatttcacacaaagaacattatatgatttttccccgccgccgtcaaccatttctccatgaagagtgccggtttatgatataatgtacaaaaatgagtagtacatgtttaggtgataaaaatgaaaaaacaaacaattgatgaagtgacggcctttcatcagaaaatgctttcttttttcttaacgaaatctgaatccgtctcattatccgactcgctgttatggctggcctcagctctagaatcctgctttacatctctttcattgaccctttcaccggcagaatcaacacgtttcaccataaaaacagaagatgaaccgcattatgctccgctgaaagagagtgacggccgttttatgatcaggaatcagacgtccggcagatccttttatctgcgctcggaaggcgggctgccgatcccggaatcattgcctgagatcgttactcagtttatcaatcaatctgtgagacaaagcgggctgtttgacaaaacgaagcatcagcggaaaattcacagaatgacagaaatgttccattcgcttttggatcaaaatgaggttttggaaaaactgcaggcaagtttgagtacggctttccggtctttccgcttttcactgtttatcacgcaggatcaggatacggacagacagcttcccgcaaaagaattacatatggatggaaaagatgccgatccgtctgccctgaaggtttatttatcggggagactgctcagaaaaggcaggtcatctgcttacctgccgatcaaaggccagcaggggacttacggggttctgaagacggaggggctgcaggatgccgttctttcgtgcagtactctcagtgaaatgctgctgcttgcgggcgcggcgggaaaagcatttgaaaatgcgcagctctatgagcaatcgaaaaaaagcattgcgaatctggagctcattaatgaaacatcgcgccagctgaatcagcgcctcagactcactgacacgatgcgggaactcgccgccattatgacccaatcatttcatgcggaagaagtggctttttttcatattgatcattttgagacgcaaaatctgcttccgggacataccgctttttttaagacagaacgtgcgaacccctatatcagcattgtgaaagaaaagctgttcgagggagaaaagggcgtgtttatcggcagcggaaagactgtattcggcgaaaacggcttcggctcgctgatggcggtgccgatgatcgaaaatgacaccgtcttcgggttcgcgattttattgaaaaaggatttgtatgcttttacgtttgaaatgtataagctttttcaagcgctcattcaccatgcgacattggcggtcacgaactccatgctgcgcgacaggcttgagcatcttgttcagacagaccagctgacggagctgtattcaagaacctatttggatgagaaaattcaatacagcatgaaaattcataaacggggtgtattcatcctcgttgatatcgataatttcaaaaccattaatgatacatacggtcatcaaacgggagattcgatcctgattcaggtggcctccgttatgaaaaaccatattcgtgagcatgatgtcgctgcaaggtggggggcgaggagctggctgtctatctgccgaatatcaacgtgtcatccggagaacgcatcgctaaaaggctggttcgcgccatccgggaaaacaccgagccgcgcgtgacgatttcctgcggcgtttcctgctggtcaaagacaggcccgatgccgttgaaaatgctcgttcagcaagcggacgaggcgctttatatcgccaaacggaacggcaaaaaccggctgatcatccaccaaaacagcacgacgacataaaaaaggagccggcctgccggccgggctcctttttttatcctaatcgtttttcaagcgtttcaacaaactttgctaaataggcttcgtccgtttcatcaaaacggtttttcacagggctgtcaatgtccagcacaccgatcacttcaccgtttacgcggatcgggaggacgatttctgactgggaagccgcgtcacaggcgatatgtcccgggaacgcattcacatcggcaatccgctgcacggcgccgttagagtaggcagtgccgcatacgcctctgccgaacgggatgcgcacacaggcaggaagtccttgaaacggtccgagcacgagctcgccctctttagcgaagtaaaaccccgcccagttgacttcatgtaatgaatggtataaaagcgctgatgcattcgcgtaatttgcgatcgcatccgtttcatcttctgtcatggcttcgagctgtttaagcagaagctgataacttttttctttatctccggattgtttttcgacatgaaacatggaaaaccctcactttttctataatatcaaacaaagttccggccgttctgccggcatttgtcgagaagttcttacaggaacggcgcctttctgcttgaattgttacacataaaggggtgagccgtatgaaagtaagcaccaaagacaaaattattaacgccgctgtccagctgtttaaccaaaaaggttattccggcacgtccgtccgtgaaatcgcaaagtcagctgatgttaatgttgcgcacatctcctactattttaaagggaaaggcggattaatggaacatttagtttccgagttttacgaaggctatactgaagcgctggaaaaagccgccgtcagtttgaacggtgaagacgcgcaggaacgcatcctgcgggtgattttcgatattttatcctatcagcacgataaccgtcaactaacgcggtttgtgtaccgggaagtgacgattgattccgtgcttatcagggaaattatgtctacttacttaatgaaagaaaaatatattttccagctggtgattgaagaagggcagtcacgccacagacggctgacgctgcccgtgccgcattttattctgcaattgaaatccctcttgatgatgccgtatcttcagcctcaatacattacagaggtgctctatatgcagcctcatgaaccgtacttttataaaaggtattttgaagaggtgaagatctggatcgaaagcgtgttccgacggcctgatgcggcgcttatgaagtaatgatgcttttgtacgtttcataggaactgccgacatcttccgcttgatgggcgtccgacccgaatatgagcgggatttttttttgcttcgcggtctcagccatccaatcctccatgtatacttccccggcaaacttctttctgagcccggatgtattcacatccagctccattccgtgttctttcacggcgtcaagacagcgggccgcaagctctcttatttgaggtgacatgctgtaagggaaaaggcgtgcgaattttttgacgagcgtgatatggccgacccgttttggcttaaaggggccgagcggtgttacaatggaagaatacacagtttcatagtattgttcatatacggcttcaacgcttccgaagtgcgcggcgagctgctgaaaggcgtgctcgtcaaaatcgaggcagatataagacggaccggtcttcaaaaaatgaacggataaaatgccgtcatccagtgaggggccgtacgtgttcagaaacgccgcggtttcctcttcataccctgtgataaaatcagtttcgagcccggtcagaatgctgatttgtccatcgtattcctttttcagctgtgacagccgctccaaataaacctccatctgtctgagatccatcgcgctgtcctgaagcggtacgggatcttgaaatgacggaggaaggggggcgtgctctgtaaatgtgatcgagtcaaagcctctttccagggccttttcgacatattctttcagcgcatccttcgagccgtgagggcaaaaaggcgtgtggatatgagcgtctcgtttttccatttgtgtcactccattaaaaaattgcagaatcctgccgaaattatgcaaaaagtttttgatttctggtcaaaaaatgttggttacatggtatcataataacaatgaaaacgacagattttctcaatacatatattgaaatctttctgaatacataaaacaccctgacagattaagagaacaacaaggggctcattatggagttagtcatcggattattggttatactgctcgcgctctttgcggcgggctactttttcaggaaaaaaatttatacggaaattgaccggctggagtcatggaagattgaaattttaaaccgttcgatagtggaagaaatgtccaagatcaaacatctgaaaatgaccggagagacggaagagttctttgaaagatggcgcgaagagtgggatgaaattgtcacagcccatctgccgaaagtagaagagctcctttatgatgccgaagagaacgccgacaaataccggtttaaaaaagcgaatcaggtgcttgtccacatcgacgacctcctcactgcagccgaatcaaatatagaaggcatactgcgtgagatcagcgatcttgtgacgagcgaggaaaaaagccgcggagagattgaacaggtgcgtgagcggtattcaaaagcgcgaaaaaaccttctggcgtatagccatctctacggagagctatataacagcctggagacggatctcgacgaaatctggagcggcataaaaaagttcgaagaagagacggaaagcggcaattacatcaaagcgagaaaagtgctgcttgaacaggaccgcagactggatcagcttcaaacatacatagatgacgttccgaaactgctcgctgactgtaaacagaccgtgcctaaccaaattgccaagctgaaagacggctaccgggaaatgacggaaaaaggctacaaattggagcatattcaaatcgaaaaagagctggagacactcaccaatcaattgaaacgggccgaaagcgcgcttttggaagaattagatgtcgacgaagcgtccgccattcttcagctgattgatgaaaccattcaatcgatgtatgaacagctggaaggcgaagtggaagccggacagtccgtattaagcaaaatgcctgagctgatcatcgcgtatgagaagcttgaggaagaaaaagaccgcacaaaaaccgaaacggagctcgtcaaggaaagctatcagctgacggcgggagaaatcggcagacagcatgctttcgaaaaacagctggaaacgatcggccggctccttgagcaggcgagagaaaagcttgacggtgagcatgtcgcttactcgctgctgattgaagaagtcgaggccatcgaaaagcagatggaagaagctcagaaagaacatgccgaataccgtgaaaatctgcaggcgctcagaaaagaagaactgcaggcgcgggaaacgctgatgaatcttcggaaaaccatttctgacacggcccgaatgctgcaaaaaagcaacgtgccgggaattcctgaacaagtcaaggacaagctcgagacggcaaatcatcatatagaagagaccgtcagccaattggaagagctgccgttaaacatggaggaagccgccaaacatctgaccgaagctgaaaaggtggttgcggaagtcagcgaagaggcggaagaacttgtgattcaggtgaagctgattgagcggatcattcagtacggcaaccgtttccgaagccagaatcatattttatccgaacagctgaaagaagcggaacggctgttttacgcttacagctataatgaagcttatgagatggcggcagatgctgttgaaaaagcagctcccggcgccgtgaaaaaaattaaagctgatcaatctgcttcatagacgcacaagcaaaaactgcaccctgatggaaatcagaggtgcagtttttttgtttctcacggaatataaaaagcgcctatggctgatatacatcaaaccgcaggcgctgaatgttacgattttgctttatttaattcgatgggcgggctgataaaaaacgtgatgatgcagccgatgatcgctccggcaatgcccggaagcacccagccgattcccatgctgtaaagcggaagatttgcgtttaagaatgaatctaatgatccgagcggaatgccggctgccttcaaaccgtccaggatactgaacagccccgttccgatcaggcaggcgatatagacttcgcgtctttccttaaagattttatcaataaaggaaagtacgataatgacaatcgccagcgggtaaatggctgataaaataggaactgaaaatgcaataatctcagcaagtccgaaatttgaaatcgccagactgaacagcgtgacaatcgtaaccaccattttgtatgataaagcgggaatcaattttgaaaaatattcgccgcaagatgtgacaagcccgatgcttgtcgttaaacacgcaacggtgatggcggcaccgagaacaatgtttcccagtgaaccgaacaggtaatcagatgaagctgataaaatctttgcgccttcgccgagcggcccgacagcgtccgtgcttgtcgctcccaaataggccaaagataaataaatgaatgtcaaacccgccgctgcaatcagacccgctttaatacaagcggcggcgagcgctttacgctgggtgacgcccctgcttttaacagcgttgacgacaacgacgccgaagacgattgaggcgagcgcatccattgttttatagccttccaaaaatcctttgaacaccggcgttccggaatatgcctgatgtacggcgcccagcccgcccatcggagtgacgatggcttttacgacaatgattaaaataataccgaatttaatgggagtcaaaatctttccgactctgtccacgattttggacgggttaagagctaaataatacgtaatagaaaaaaagatcaacgtgaaaacaaataaagataatctttccggaatgccgcttaaaaacggaactgcaccgatttcatatgaaacggttccggttctcggaatcgcgaaaagcggcccgattgataaataaagcacaacggtgaaaatagtgccgaataccgggtgagccttatcggcaagtcctttcgcgtctttgcccgttaatgcgatggcgataatacctaaaagcggcagtcctacgccggtcagtaagaaaccgcccatcgctttccagacattatgccccgccgcttgcccaagctccggcggatatatcatatttcctgccccgaaaaaagtgcgaagagcatgaaaccgataataacggtatctttgacaggtagtgagtgtttcataaaagtcctcctaaatactatgttgaaatattctgtcaattaattgtcagataatataacaaaacgaacattacttattatatggcaatgtacagagaagtcaatactcgatttattgcgaatttctatttacttttgttatggtagcataaatatcatacgatgtaccgttttcataaaaggagtaaaaaaaatgatatatttagacaacagctcaacgaccgagccgtatgaagaggttttggaagtgtataaacagacgagcagccgttatttcggcaatccttcgtctctgcaccagttaggaactgagacggagcagctccttgaagcggccgctcagcaaataaaaagaaccttacgtttaaaaaattatgatattgtatttacatcaggcgcgactgaagcgaataacgctgcgttaaagggagcggcctgggcaaacatgagtaaaggaagacatatcattgcttcggcgattgagcatccttctgtgacggagacgcttgatcagctgacagagctgttcggctttgaagtcacatatcttccggccgatcaaaacggcttcgtttctttgaaagacgtcaaatcggctatcaggccggatacgataatcgtcagcgtcatgcatgtcaataacgaagtcggctccattcagcccgtaaaggaaatcggcgggtttttgaagcagcaccggaatattctgtttcatgttgatcatgtgcagggcattcataaagttcctctgtctatagaagaagcgggcattgacctttgcactgtttcagggcataagtttcacggcttaaaagggaccggagcgcttatcgtcaaaaaaggaacgcggctcattccgcttataacgggcggctcgcagcaaaaaggcgtccgggccggaacagaacatacggcaggcgccgtttcccttgcgaaagcgatcaatctttccgcgcgtgacatgaatgagcggctttcttccgtggaggctgccaagaatgcgctcatggaaaggctgagcggggcggacggggtcgtcatcaacactcccgccgaaaacagcgctccgcatatcattaatttttccgttccgggcgtgaaggccgaagtgctgctgcacatgcttgaggaaaaaggaatatatgtctccacaaccgcggcatgttcggcaagagagcataaaccgagccgtgttcttctgcaaatgaataaaggcgaacaggttgcatcaagcagcatcagagtcagcctgaacttcatgcatacggctgacatcacggagccgtttatggccgcgctggtgccggctgttcaaaaactaaaaaaaatgatgaggtagcatatgaattacgatcatattttaatccgttttggtgaaatatccacaaaaggaaaaaacagacgcagttttattgaaagattaaaacaaaatatccgcctggtattaaaggattataaaaaagtaaaatacttttcaaaccgggaccggatgtcaattacacttaatggagaaaacccggagggaatttgttccttattaaagaatatattcggcattcaaagtttcagtctcgcaattaaatgcgaaagcaagctggaagacattaaaaaaacggctttagccgcgatagaaggcgaatataaaccggggaatacgtttaaggtcgagaccaaacgggcttacaagcagtttgaattagatacgaatgcgatgaacgctgaaatcggcggccatattttgaaaaacacggatggattaaccgtcgatgtgaaaaatcccgatattccgcttcggattgaaatcagggaggaagcgacattcctgaccattcgtaacgaaaaaggcgccggaggccttcctgtcggttccgcgggtaaagcgatgctgatgctttccggcggttttgacagtccggtcgccggtttttacgcgatgaaacggggattatcagttgaagccgtacatttcttcagtccgccgtatacgagcgaacgggcaaagcagaaagtcatggatctcgcgggatgcctcgcgaagttcggcggcagtatgacgcttcatatcgtgccgtttacaaagacgcaggaactcatccaaaaacaaatcccggaaaactatacgatgacggcgacgcggcgtcttatgctgcaaatcgcggacagaatcagagaagaacgaaaagcgctcgcgatcattacgggggaaagcctcgggcaggtagcgagccagacgcttgaaagcatgtatgcgatcaatgccgtgacggcaacaccggttttgcgccctttaatcggaatggacaaaacagaaatcatcgagaaatcaaaagaaatcggcacttatgaaacaagcattcagccgtttgaggattgctgcaccatctttacgccgccaagtccgaaaacgcgtccgaaaaaagaaaaaatcgagcacttcgaaagcttcgttgattttgaaccgctgattgcagaggccgctgccggcatcgaaaccatcactgtttactcagagcaggaagctcacgataagtttgccggcctgttttaaaactgtatacaattaccaaagtttttttgaatgaagacatgtgttttatcacattctatactcacaaggaggtgatacacatgtcacaacaatcaaacagcggaaacagcaaccagcttttagtgccaggcgctgctcaagctatcgaccaaatgaagtatgaaatcgcttctgaattcggtgtaaaccttggaccggaaacaacttctcgcgccaacggttctgtcggtggagaaatcacaaaacgtcttgtctcttttgctcagcaaagcatgggcggaagcagccagcagcagttttaatcacaacttcacataatggctaagagagcggggaattccccgctcttttttcatgagtatagatagaaggctggaagcaatttatgcatatttttattgtaatggcctatgtttatgtataatggggaaagaaagtgaggagttgttcgtgttaaaacgagaagatttaatcgccccaaagaactataatcttgtaaatgaaatcgaaaagttcagccgttccaaagagaagaacgcgcttatttgggaagatcaaacaggcggcaagaaagtctggacgtatgaaaaattgatggaagaaacgaataaaatcggagcccgcctgaaaggtctcggatttgaaaaaggcgataagctgattgtcatggttccgagagtgcttgaagcgtatgccgtttatttagcgatcttaaaagcggggatggtcgtcattccttgctcggaaatgctgcgcgccaaagaccttgaataccggatcaaacacgccgaagtgaaaggcgctatcgtttatccttcatttataaacgcatttgacgaggtgaataccgagcagctggtgacattgtcaatcggtgaaaatgatgccggctggaaaaacctcttaacgattgaagcggacggaaacagttttcaaacagctgatacaacaagagaggacatggcgtttttgtcctatacttcaggcacgaccggccagcctaaaggcgttgtacatacacacggctgggcctttgcccatttaaaaacatcagccggtgcatggctggatatttccgaagacgatacagtgtgggccaccgcggcgcccggttggcagaaatgggtgtggagcccgctgctcgccgttctgggaagcggcgcgacaggattcatttatcacggcagattcaacgccaagacgtatttagagctgctggagcgccatcaagtaaatgtcttctgctgtaccccgacggaataccgcctgatggcaaaagtggaggagttggacaaatatgatctttctgcccttcacagcgcagtttctgcgggtgagccattaaaccgggaagtcattgacgtattccggaagcatttcggtattaaagtgagagacggatacggccaaacggagagcaccctgttagtcggcgtcctgaaggatatggatattaagccgggaagcatgggcaaaccgacccccggaaatcaagtagagattataaacgataagggcgaaatatgcgaaacaggcgaaacgggcgatatcgccgtgcatttgagcacaccggccttattcaaggaatattataaagatcccgaaagaacgaaaaagcagattcgcggagattattttcttacaggagaccgcgcgaaaaaagacgaggacggctacttttggtttgagagccgcaatgatgacattatcgtcagctccggatatacaatcggaccttttgaagtagaggacgcgctcgtgaagcatccggaagtgaaagaatgtgcagtcgtggcaagcccggatgaaatcagaggttcaatcgtaaaagcttatgtcgttttacaagacgatgaaaagcggagtgacgaacttgtcaaagaactgcaaaaccacgtaaaaacgattacggcgccttacaaatatccgagagagattgaatttgtcgaaagcctgccgaaaacggcgtccgcaaaaatcagacgtgtggaactgagacagcgtgaagaacggctgaaggctgataaaaaagcataatacaggataaagggtgagcggggatgaaagcgatttggcacggcggcaccatctatacaatgcttgacaagaatcatgtcactgaatccgtttataccgaagaaggcgtcgtcaggaagacgggcagctatcgggagctccaaggaacatacggttcgcctgatacggaggaaatcgatttacatggagctgtcatgttcccggggtttacggacagtcatatgcatttaatcggacacggggaaaaacagcttcgcctcgatttgtcgcagctgacgtcaaaagaagcgatcctgcgggccgcaaaagaagcagagcgtgaattggaagatggcgaatggctgatcggcgaaggctgggatgaaaacctgtttgaacggccggattacgtcacgaagcatgaccttgacccgctctttcccgaccgccccgtcctgctgaagcgggtatgccggcacgccgttgcggttaattcggccgcattgcgcgcggcggggattacaaacgaaacatctgatccaaacggcgggattatcgtccgggacggcaccggtccgacaggccttctgctggataaagcccaagagcttgtgacacaggccctgccgcccgtctcacttcactatgtcaaacgcgcgcttcaaacggcgattacggactgctggtcaaaaggcctgacaggcgggcattcagaagatctggcatactacggagacgcgtccgttcccgttgccgcgtacgagtctttaaccggcagcggcctttatccttttcgcgcccatctgctcgttcatcacgaagccgtcgacagctggagcgctctggataaatcgaccggaccttacctggaatacggagcgatgaaaatttttgctgacggcgcgctcggaggcagaaccgctctgttgaaaaagccttatcatgatgatccgtcagtttccggcgttcaggtgcacgatgacgagacccttgccgctcttgtttataaagcgagagagaaagggatggagatcgccgtgcacgcgattggcgaccttgcatttgaaaaggtgctcgatgttatcgaaagatacccggcaaagcccggacagctagacaggctcattcatgcgcaagtattagatgccggattgattgaaagagccgcccggctgccgatcggacttgatcttcagccgcattttgtggccagtgattttccgtgggtgattgaccggctcggagaagagcggatgaaaacggctttcgcctggaaaacactgctgtcaaaagggctgctgtgcgccggaggctcagacgccccgattgagccggccgatccgcttctgggcattcaatcggctgtgctccgtacaagcaagcagcatccggaaggtccggcctattatgaaaaagagtgcctgaccgtgtacgaagccattcagctttacacggagggaagcgcggccatcatccataaagaacatagccgcggacggatcgcccccggctatgatgccgactttaccgtactcagcggtgatccgttcgggacggatccgaaaaagcttcatgaattggaagctgtcaaaaccgtcgtcggcggccgtatcgtatatgaaaaagaggacaggcagtgatgcccgtcctctttttttatgataaaaatgatcgctttactttttcccagaaagagttgtctttcagtttcaccgttttgatttttttatcggatagtgtaatctcaacctttttgacattccgcgtgctgagcgcttcattatcaagcccgataatcggatgctcattgccgtcctggaccacctgcagtgtcagcttccggtctgagcttaaaataaacggagatccgagtgtacggtatgtgttgttgttcaacgacgccagttcggatacctgcatgcaggaaatcaaaggatcaacaacggcgcctgaaacagatttattgtaggcggtgctgcccgtcggggtggaaatgatcatcccgtctcctctgaacgtctcaaaatgaagatcatcaattaacacatccatcacaaacgttttaataatgcttgaacggatggaaacctcgtttaaacagtgaaaatgattgctgccgtccaccgttacatgaatgagcgggtattttctgacctcaagctgttccgcggtcatgctggccgccattttttcaggctcatcgctgtgaaaatcacagtacaaatgggctttcccttttttagcgatgccgacatacaggcagtcatcacggaatccggtttttctgacggcttgcagaaatgagccgtcgctgccgatgctggcgataattccggcatcctccgggtgagccgcaactgtaaaaccgtgcgattcagcaagctgcttcaaagagctgacttgttcttttgtttcgttgttttgtttgtgaaaaaaataaacattgcggcgaagatcggtcatatccccattcccctttgctgtcatatttacgtttttctcccagcaggtattgtgttaaaatacctgtggcaatagtgtaacatgtttcctgtttatccgttaagagaaagcgcttcatgaaaaaaatgaatctttttttacgggggaacgtacgaatattgacagaaaaggaggagaacaaatgaatgcaaaaagatggattgcgctcgtcatcgcgctcggcattttcggcgtatcggtcattgcaagtgtgaccgtcggggtgctgaagaatatcggagatacagggtctgactttgcatcactgacagatgacacagaggaagtgacgctggataagggcagccccggcagtaaaatcgccgtgcttgaagtggacggcacgattgaggataacggcgggtccgctggcctgctcagctcaggcgggtatgatcacagatcatttttaaaacaggttgagcgtgcgaaagaagataaaagcgtcaaaggaattgtactgaaaatcaattccccgggcggaggcgtgtacgaaagcgcggaaatacataaaaaactggaagaactaaagaaagaaacgaagaaaccgatttatgtgtccatgggctccatggcggcatcgggaggctactatatttcaacggccgccgataaaatctatgcttcaccggaaacgctcacgggttcactgggcgtcatcatggaaagcgtcaattattccaagctcgccgatgaactcggcatcaagtttgaaaccattaaaagcggcgcgcataaagacatcatgtccccgacccgcgacatgacgaaggaagaaagaaagatcatgcagacaatggtcaacgattcttatgaaggatttgtcaatgtcatttcaaaaggccggcacatgtcaaaagcggatgtgaaaaaaattgccgacggccgtgtttacgacggcagacaagcgaaaaaaatcggcctcgttgatgagctcggtttttacgatgatacgatcagcgcgatgaaaaaggaccataaaaatatgaaaaacgcttcagtcatcacatacgaggaaggattcggattaggctcgctcttttccatgagcgcagcgaaaatgtttaaaagcgaaattgattttctgaatatgaaagaactcatttcgcaatccggttcgccgcggatgatgtatctctatgcaaagtaggggggaagaaagaatggacgcgacttacgaaggctttcacggcaaagaagaggaagccgaacaacagagggcgcccgagcaggcatatgcgggcttttggatcaggttttgggcgtttcttcttgattggctggtggtctggggacttaaccatctcatcgtttcaccgattttcacgctgatgaagctcccggcaacaagcggaatgtttacaatctcagcttattccgtcacaaccctgatcgtctacctcgcctattttgtgttcatgacgaaatggtttcatcagacactcggcaagatggtcttcgggttaaaggtcacttctttgacgcccggaaagccgctgacttggagcaccgtcattttcagagaagcggtggggcgttatatcgataaaatctggattctctatatcgtcattgcgtttacgcccaaaaagcagggcattcacgatctgatcgccgacacaacggtgattcacgaagcgctgtaccgcaaataaaagcagtaaacccggaataaacgtccgggtttattttttttggttttggcgataatgctgctaaggaagtgaagcctatgggatatgccgcagcagctgttattctcattctcattttggtctggctgctcatgaggatgaaaatccatctgactttcgaatatcttcacgataaagataacgacaaactgacgtttaaactctcggccttatacgggctggtccgttttaaaaaaacgctgcccgtcattaaagtaaacagcgaagacgcgtctattgatgtcaaacaggacacgaaatcagaaatgaaaggtcagaaaaaagagaagaaaaaaatcacatatgaagatgtcaaacagagcattcacagaatagaaatgattctgcaccaagtcttgcagatgcgccaaatcgccgcctcatttcttgcgggagtccgtgttacgaagtttgaatgggtgacggttatcggaataaaggacgccgccgttacgggaatcgccgccggcggattgtgggccgtaaagggaggccttacggcgatgctgtatgatcatctgcgtttcatacataaaccggtgtgcgaagtcattccgtcttttcaagtgcctgcatccaagacgcatttgcagtgtatattcttttttcgttttggacatcttataggtgcagctttcaaattgctcaaatacgggcggaacggactttctatcatacgaaagaaacagccggttccggttgcttcaaagaatgattcatcagtttaaggaggagcgcatatggcagaccaccccattcaaggtttaatgaaaaccgctatggaaaatttaaaagaaatgattgacgtgaatacaatcatcggcgatcctgttgaaacgcctgacggcagcgtaatcttaacggtttcaaaggtcggattcggatttgcggcgggcggaagcgagtttggaggaaagccggctgaaaaaagaaccgatgatgatgaaagaaaagagcagaaactcccgttcggcggcggaagcggcggcggagtatccattacgccgattgcgtttctgattgtcggaacaaacggcgtgcgtatgcttcatttagacgaaaacacccatctgattgataaactgttagactccgcgcctcaaacgattgaacgcatccagcatatgtttaaaaagaatgaaaaaggccggaaccaaaaaagaacggatatcgatttataacagaaaagttaactgccgcccgcagttagctttttttacgatgcggcataacctttgcagtttgcataaaactcgactatgatagagctatacatagataaagggaggaatcagaatggctgaaattacatttaaaggcggagccgtgacgctgatcggacaagaagtgaaaccgggtgaccaagctcctgacttcacggttttgacaaacggattagaagagaagacattagcagatatgaaagggaaagtaacgatcatatccgttattccttccattgacacaggcgtatgtgacgcgcagacacgccgcttcaacgaagaagccgcaaaactcggtgatgtgaacgtttatacaatcagcgccgaccttccgtttgcacaagcgcgctggtgcggagcgaacggaattgataaagtggaaacattatcggatcataaagagatgtcatttggtgaagcattcggtgtttacatcaaagaacttcgtcttttggcgcgttccgtattcgtccttgatcaggacggaaaagtcgtttacgcggaatacgtaagcgaagcgacaaaccacccgaattatgaaaagcctatcgaagctgcaaaagcgttaatcaagtaaagagagaaaaagagctccgggtgctgccgcggagctcttttcatggcaaggaggaaacagcatgcaacacgatcatgtcggtcagatttatgaacttttagatgaagccgcccaagtgatagcagaaggccttgagatttcttatattgaggggcttgcggaggcgggagagatgtattttcttgaaacaacggaccagcttccgcttcaggaaaaacaaaccggcgagcttaaaagcctgcttgcgaaagcagacttcagaaaatgggagcatgaatggatccgcaaggcgttccagctcgccattttaaaaggactgaaagataagtcccatccgaacagacagatgacgcctgatacgatcggccttttcatcagttacctcgtgaataaatttacgggcggccgaaaaggcctgacgttgctggaccccgcctgcggcaccggaaatcttctgctgaccgcggcaaaccagctttctgacaaagcgggaaaaagcttcggcattgaaatcgacgatgtccttctgaagatcgcatatgcgcaggcgaatctgcaggaaaaagaaatggagctgttctgccaggacagtcttcagccgttatttatcgaaccggccgatgcggttatctgcgatttgccggtcggctactatcccaatgacgaaggcgctgaagcgtttgagctgaaagcggatgaaggccactcatttgcccaccacttatttattgagcagagcgtcaaacatacaaaaccgggcggatacttattttttatgattccgaaccatctgtttgacagcgcgcaaagcgataaactgaagcggttttttgcggaaaaagtatatatcaacgccctgcttcagctgccggctactatgtttaaagatgaagcgcaggcaaagagcattttaatcctgcagaaaaaaggcgaagacgcaaagccgccgaaacaagcgcttttggcgaatcttccttcttttgcgaaccagcaggcgatgcgggagatgatggcaaaattggatcagtggattcaaaaagaaaaataatggcgaaaaagcagtgtgagacgcaaaattccgcgctgcttttcgctttttaaaatgaatggaaatcagggcgaaaacacaaattaaggaaagaaaataacattccgtaaggccgtgccgtccatttggcacaaatgagatttatcagaaaatatcgacttcgtattgtaagcggtaccaatgtggatgttgacttgaaatgctgagttgacaatgtttaaatggaaaagtcagatattttttggaccgcagttatggtctgggaaaaaagaacgaacaaacgaagaagaattttgataggagcgtcatttatgtctaaaattattgcaattaacgcaggaagctcatctttaaaatttcagttattcgaaatgccttcagaaaaggtgctaacaaaaggtttagtagaacggatcggtatcgccgacagcgttttcactatctctgttaacggcgaaaaaaatacagaagtgacagatattccggatcatgcggttgcggtgaagatgctgcttcacaagctgactgaattcggtattataaaggatttaaacgaaattgacggaatcggccaccgtgtggttcacggcggagaaaaattcagcgattctgttttgcttacggatgaaacaatccgtgagattgaagagatttcagaacttgcgccgcttcataacccggctaacatcgtcggcattaaagcctttaaagaagtgcttccggatgtgcctgcggttgcagtgtttgatacggcgttccaccaaacgatgcctgagcaatcttacctgtacagccttccgtacgaatactacgagaaatacggcatccgcaaatacggtttccacggcacttctcataaatacgtgacacagcgcgcagctgagcttctcggccgcccgcttgaagatttgcgtctgatttcctgccacctcggtaacggcgcaagtatcgcggccgtagaaggcggaaaatccattgatacgtcaatgggcttcacaccgcttgcgggtgttgcgatgggaacacgttcaggaaacatcgaccctgcattgatcccgtacattatggaaaaaacggatcagacggcagatgaagtattaaatacattaaataaaaagagcggactgcttggcatatccggtttctcaagcgacctccgcgatatcgtagaagcttcaaaagaaggaaacgaaagagcggaaacggctcttgaagtgtttgcgagcagaatccataaatacatcggttcttacgctgcgagaatgagcggcgttgacgcgattattttcactgcgggtatcggtgaaaacagcgttgaagtcagagaacgcgtgcttcgcggcttagaattcatgggtgtatattgggatcctgcgctgaacaacgtgcgcggcgaggaagcgtttatcagctaccctcactctcctgtcaaagtcatcatcattccgactgacgaagaggtcatgatcgcacgtgacgttgtccgtcttgcacagtaatgatcgaaaaaagcacatcctttagggtgtgcttttttattgaatgccccagaatcaaacgttacgatatgtttaatacataaacgatgaggtgaagcaatgagtgtgcatgaacataaacaagaagccccgtcagccgtgcgctgcaaggtgataacagtcagcgacacgagaacgaaagaaaccgacaaaagcgggcgcgtcatgatggatttcatcagagaagcgggatttgaaacggtcgcttatgacattgtaaaagatgaaaaagatgaattgcagaaagccgttttatccggctgtatggatgaatatacagatgcggtgctgttaaacggagggacgggcattgccgaaagggatgtcacaattgaagcggtcacgccgctgttttcaaaagaactcccggggttcggcgagctgttccgcatgctgagctatacggaggacatcggctccgccgccattttgtccagagcggcagcgggtgtgatccgaaataccgcagtcttctgcacgcccggctcctcaggcgccgtaaagcttgcaatgagtaaactgattattcctgaactgcctcatgtgctccgggaaatccgaaaagatttataaatgtataaaaaggctctgctccgctcaaaaaattgggtggggttttttttataaaaggcttgaaaaaacagaatttacttgttacagtgtatacatacaaaatgcatttttattaattaaaactaatttttatacaaagggagcttttaacatggcagaacaaaaaaaggttgtattggcatactcaggaggtcttgatacttctgtagcgataaaatggctgcaagaacagggatacgatgttgttgcctgctgcttagatgttggggaaggaaaggatttggcattcgttcagcaaaaagcgctggaagttggcgccgtaaattcctatgtgattgatgcgaaagaagaattcgcccgggagtacgcgctcatttctatgcaggcccatacaatgtatgaaggcaagtatccactcgtatctgcactatcccgtccgttaatcgcgaaaaaactcgtggaagtggcggaaaaggaaaacgcggtggccgtagcgcacggctgcacgggaaaaggaaacgatcaggttcgtttcgaagtatccattaaatcattaaatcctgatctggaggtcattgctccggtccgtgagtggcaatggtcgcgtgaagaagaaattgaatacgccgcaagccgcggcataccgattccgatcaatcttgacagcccgtattccatcgaccagaacctatggggacgcgccaatgaatgcggtatattagaagatccgtgggcggcgccgcctgaaggggcatatgacctgacagcatctcttgaaaacacgccggacgttccggaaatcatcgaaatcgcatttgaagccggtgttccggtttcaatcgacggcgtaacctacccgctcgctgatttaattctcaagctgaacgagactgccggaaaacacggcatcggccggattgaccatgtggaaaaccgcctggtcggcattaagtcccgtgaagtttatgagtgcccgggcgccatgactttgattacggctcacaaagagcttgaggatctgactttagtgaaagaagtggcccatttcaaaccggcaattgaacaaaaactgtctgaaatcatctataacggtttatggttctcgccgttaaaagacgcgctgcttgcattcctgaaagaaacccaaaagcatgtcaccggcgttgtgcgcgtcaagctgtttaaaggccatgccattgtagaaggacgtaagtcggaatattctctctacgacgaaaaacttgcgacatatacaaaagacgatgcgtttgaccatcacgcggcaatcggtttcattgagctttgggggctgccgacaaaagtaaacagcattgtgaaaaagaaggagcagattgaagcatgaagaagctttggggaggccgttttcaaaaaacaccggaaaagtgggtcgatgagttcggcgcatccatcacattcgaccaaaacttagtcaaagaggatattacagggtctctcgctcatgcggcaatgctgaaaaaatgcggcattctgacggaagaagaagaaggtgccatccgtcaagggctgcagactctcctgcaaaaagcagaggaaggagcgcttgaattctctgttgattatgaagatattcatttgaacattgaaaaaatgctgattgaagaaatcggaccgctaggcggcaaactccataccggaagaagccggaacgaccaggtggcgactgacatgcatctatatttgaaagatcatgtctcgcatatcatcgtgctgattgaacagttccaaaaagcgctgatcgaaaaagcggaggccaatgtcgagaccattctgccggggtacactcatttgcagcgggcccagccgatttctttcgcccaccatctgcttgcttatttttggatgcttgaacgggataaagagcgttttcgggatgctatgaagcggattaacatatcgccgctcggatgcggggcgcttgccggaactacgtttccgatagaccgtaactattcggcggagctgctcggttttgactccatttacgagaacagtcttgacggagtcagtgacagagattttattctcgagtttttaagcggcagcagcatgctgatgatgcacctttcacgtttgtcagaagaaatcattctatggtgctcgcaggaattcagattcattgaactggatgatacgtacgcgacgggaagcagcatgatgccgcagaagaaaaaccccgacatggcggagctgatccgcggtaaaaccggacgcgtatacggtgatatgatgggtcttttcacaattatgaaaggactcccgctcgcttacaacaaagacctgcaggaggataaagaaggcatgtttgacacagtaaaaaccgttgaaggaagccttcagattttcacgggcatgattgaaacgatgaaagtaaacaaagacatcatgaaacaagcgacaaaacaagatttttcaaacgcgacggaacttgccgattatttagctaaaaaaggcatgccgttcagagaagcgcatgaagtggtcggcaagcttgtgtacagctgtattgaaaaaggaatctatttaagtgacatggcatttgaagaattccttcaagccagcagtctctttgaagaagatatctataccgtgctcgatccgcatcatgcggttgaaaaaagaatgagcgccggcggaacgggttttcagcaggtagaacaggcgctcgtaaaagcaaaagcctgcgccggcatttaatttgctgaaatttccttcatattttcccgtcatatcagacaccctacatctataaaagatgggaggtaaaaggaatgcgcaaagaacaagaccgttacatctatgatgaaaaagaaagtgaagaaacggccaggcttatctcagaggcataccaaagcggttatgtcggcatggaggaagcctctgctccttcagaaaattaagctgtctgtaaagacggcttttttttcgtgcggacgaagtgcaaaaaagtgatattgccgtttgtttatagtaaagtagagggagaaacgtcttgattttattgaagcggctacgttgcctggggagggtattcaatgtgcgacatgctctaatcactgccggtacaaagggattgggccgaaaagtgactgaaatgcttctggaaaaaggcttttctgtcacagtgaattacagacaggacgaagaagcggtcgcttgtctgaaggcggattatcccgggtgccatgacagattgcaattcgttaagggcgatgtaacccggaaagaagatctcatgcggatcgccgatgcagcccttcagcggtttggaaggattgacatactgattaacaatgccgggccgtacatatttgagcgcaaaaagcttgccgattactccgatgacgaatggtatggcatgcttgaagggaatttaagcgccgttttccatctgtttaaagcggttatcccggtcatgagacagcagcgcttcggccggattattacatacggttttcaaggagcggaccatgcccccggctggcttcaccgttccgctttcggagcggctaaagtcggattggcttcgttaacgaaaaccattgcgattgaagaagccgaatcaggcattacagccaatatggtctgcccgggtgatattgtaggagatatgaaagaagcgtctatagaggaagcaagacggaaaatcggcaaagaaaagacgccgatcggcaggtccggaaccggagaggatattgcgagaatcatcgcgtttttatgtgaagaagattccgatcttgtaaccggaacggtcattgaagcaacaggcgggctgaatgtgattaacaggcatcaatccctgtaagttttttcgtttgtcaaaaagggaacttgataaatattaattttttatgaggtgaaaacgatgaaagtgacttatcacggacattctgtcattcaagtggaaacgaaaacccataacattatttttgatccgtttctgaccggaaacagtctgacaaatttgaaaccggaagaagtgaaagcggatgtcatcctgcttactcacggacacaatgaccatgtcggagatacagagcagatcgccaaacaaaacgatgcgctcgtcattgcgccgaacgagctggccgtttatctcggctttaaaggtttaaaggtccacccgatgcatatcggcggggcgcaccaatttgatttcggcaaagtaaaactgacacaggcgttccacggatcggcggtcactgatgaagaaaacaaaaccatcacatacaccgggatgccggccgggattttattaacgattgacggcaaaacgattttccacgccggcgatacggcgctgttctcagatatgaaactgatcggggaactgaatcacattgacctggcgtttctgccgatcggtgataacttcaccatggggcctgaagatgcgaaactcgcggctgaatggctgagagcgaaacaggtcgttcccgttcattacaatacattccccgtcattgaacaggaccctgacgctttcgctgaaagtctgcccggaggcgtcggcaaagtcatggcggtcggcgagaccattgagcttgcctgacatatgtgtcaaagaccttctgaatcaagcattcagaaggtcttttttgtggtgccgccttttttcgggcgtctcattgcgaatgaatcccccgtacccttataataaaagcagaagactgtccttagaggtgaaacgcttggcaacaaagcatgaacaaatcctatcatacatagattcgcttcctgtcggtgaaaaaatttcggtcagaagaattgcgaaagaaatgaaagtcagtgaaggaacggcttacagagccattaaggaagccgaaaacaaaggattcgtttccactattgaacgtgtgggaccatccggattgaacagaagaaaaaagaaaatattgaaaagctgacatacgctgaggtcgtcaatgtgatcgacggccaggtgctcggcggaaaagcaggtctgcataaaacgttgaataagtttgtgatcggggcgatggagcttgacgcgatgatgcgttatacggcggcggggaacctgttaatcgtcgggaaccgaatcaacgcccaccgccaggcgcttgaagcgggcgcggccgttttggtaacaggagggtttaataccgacgacagcattatcgagctggccgatatgcttgagcttccgattctctccacgagctacgatacctttacggtagccgcgatgatcaaccgggcgatctatgatcagctcataaaaaaagagattgtgctcgtggaagatattttgacgcccgcagatcggacagtgacgctgttccctaaggataaactggagaaatggtacgaaaagaactatgaaaccggacacggccgctttccggttatcgatcagcagatgaaaatccacggaatcctcacgccgaaagatatcgcggggcatgaccggtcagttcccattgaaaaagtaatgaccaaaaaccctgtcacggtgatcggaaaaacatctgtcgcctcagcggctcaaatgatggtttgggaaggaattgaagtgcttccggtgacagacgggcatcacaaactgatcggaatgatcagccgccaggatgtcttaaaagcgcttcaaatggttcaaaagcagcctcaggtcggggaaaagctggatgatattgtttcaaggggatttaaagaagaggaagataacaaaacgccggccgtttatcaatatgaagtcacgccgcaaatgaccaatcagctcggcacgatttcttacggggtgtttacaacgattttaacccaggccgccagccgatttttacgctcccgcaaacgcggcgagctggtcattgaaagcattacgattttcttcctgaagcccgtacagatggagtcggtcatagaagtgaaaccgcgcattttagaggcgggccggaaattcgggaaaatggaagtggaagtgtcaagccaaagcggcatcgtttcaaaagcgatgctcatggtgcagctgatggagagaagttaagggacacacccgggtcccttggcattcattatgcgtggtccctctccgcttcctttgcatggatgggctcataatgcttataggctttatacccggcccatgcgctgcctgctccgattaaaatgaagacgccgccgatgaccagggtcaggacggagtggaacagaatcatttggtttactccgtacaaaagcaccagcgcgcctaatgccatacttgatttagccgaaaaacattccttctccagcgcccgtttcgtctggattccttttactttgtaatacacgtaaaagcaggcagaaagcccgatgagaaaaacaaaaaccagcataaatgaaatcctccattatatgagtttgcaaaaccgtttataccgttgctgaaagattttccttttccatggataaagagtatgattaaatgaataaaaacgaaaaggagaaaacgatgaaatccgaactgatcagaaccatatcattatatgacaccattatcttacatagacatgtgaggcctgacccggatgcctacggttcacagtgcggccttacagaaatcctgcgggaaacgtatcccgaaaaaaatatttttgccgtcggacagcctgaaccgtccttgtcttttttatattccctcgatgaggtggatgacgaaacctataaagatgctcttgtcatcgtgtgcgacaccgcaaaccaaggcagggtcgacgatcagcgctaccattccggcgcaaagctcatgaaaatagaccaccatccaaatgaagatccgtatggcgatctgttatgggtcgatacgaatgcaagctccgtaagcgaaatgatctatgagctgtacctggaaggaaagcagcacggctggaaactgaatacgaaagcagctgagctgatctacgctggtatcgtcggtgatacggggcgcttcttattcccgaacaccacaaaaaagacattaaaatacgcgggagagctcattgagttcccattttcatcgtcagagctgttcaatcaattgtatgaaacaaaattaaatgtggtgaagcttaacggctttatttatcaaaatgtgtcactgtctgaaaacggcgtcgcttccgttttcattaaaaaagacattttggagacatatggaaccaccgcttctgaagcgtcgcagcttgtcggaacactcggaaatatttcgggtatccgcgcttgggtgtttttcgtagaagaagacgatcaaatcagagtccggttccgttcaaaaggtccggtcatcaacggaattgcccggaaatacaatggcggcggacatccgcttgcggccggcgcatccatcttcagctgggatgaaaccgatcagattcttgctgatctggaagaggtatgtaacgaacacaagtagaggggagaccctctttcttagtgttcatctgtcacggggatgaaccagcagccgaattcagtcaggtcttcgtagacgcggagattacagatttggagttctttttttatgagggaagcgagtgtgtctgtttctgcatatgcggaatagccttgtctgattcgggctgcatgatcttttgccaagcggcgttcactaaaaacctccattttcccttcctcccttcagaatcgttgaaaatgtctcatctacagtttataaaaaagcggagaaaaaagcgacagatctatggaaaatttttaaaaataacataattacgtcgcaaaagaaatatgaatttcgacagacaatctcgtataaatcgtcagttcctttacttcagctttaaattccttctcatttatggtgtatattttgttttcaattgtccgttttaaaagctcctttgttttatacacgctttcaatatcctttgtgatgacttcagaaatattatctttcacctgttcctcaaatttcatcttgtcaggctgggcgattctgtatttttcccaattaatcagcttcacatcaacactttggatgagaagtctttgcttattatcctcatttaatttatgaagatctttctgatagatggagatttggttttttaaatcccgcgcgtgctcccgctgcttttcaattaacgtcacctgttcttcctgaaacgttccgtatgtaaacagaaagaacagccagctgatgatggctccgcacatcattcccgcaaaaaaacgctgccatcccggttttttataatactcgggaattctcatgatgacatattctcctgggtcagccatgaaataatcagccagccggtctgcgcgccgcccattgctgaaataattaaaagaagctgtttgaagatgtcgcgcgtgttgccttcaaacagcccccgctcgaaactgtataccgcgtcaaatgttcccccgatggccgcgacaagcgcccagatcttcagcctgttcgccaattttgtgatcgccgtcagcggaggctcgcctgataaataagctccgaggccgccgatcagcgcgccgccgagcaacacaccgagggcgataaaataactgctgatgaaattcgccataaagccggcttcctgatccatatatacaccacctcacttttctatcatattgagcgaaacggacaagtatgatgatgagtcaaaaaagaacatttgtttcttaagaaaacccgtcttataatgtagaaagacaaaatgaacgtatgggaaaggagtggcggcattgtcttttgttcacctgcaagtacatagcggctacagcctgttaaacagcgccgcttctgtaaaagagcttgttacacaagcgaaggaactcggatattcatcattggcgctgacggacgaaaatgtgatgtacggcgccattgagttttataaagcatgcaaatcaaacggaattaagccgattatcggtctgacggcttctatatacacggacgatacggagcttgaagcacacccgctcattcttttagcggagacaaacaccggttatcagaacctggtgaaaatctcaagtgcgctgcaatccatggcaaagggcggcatgaagcgaaaatggatgaagagctatcatgaggggctgatcgccattacgcccggtgaaaacgggtacattgaaagcctgcttcaagccgggaagtttgaagaagcggtccgggctgccgaaggattccgggagctgttcggagacggccgtttttatttagggtaccagccgtttaaaggacatgagacgttatcagaagagattctccgcctgtcagccgagacggaaatcgctgtctgcgctgcgggagatgtccgctatatcaagaaagaagatcaagatgcgtaccgctgtctgtgcgctattaaagccggagagaaatgggaggatcagagcgggaatctgccggacttatacttgaggacgcctgaagaaatggcagagctttacacgcggcatccggaagcgattgaagcggccgcccgtatcgcccggcaatgccgggtcgatgtaagcctcggacagacacagcttccgtcttttccggcgccggacggcaaatcagccgatgactatttggcggagatctgtcatgaggggctgcgtctccgtttcggcactcctgatgagcgggctgtccgccggcttgaatatgagctggacgtcatcaggcgcatgaaattcagtgattattttctcatcgtatgggactttatgaagtacgcgcatgaaaagggcattgtgacaggcccgggaagggggtccgcggcaggctcgcttgtcgcttactcgcttttcattaccgacgtggatccgcttaaacattctctgctgtttgagagatttcttaatcccgagcggatcagcatgccggatattgatatcgatttccctgatacgagaagggatgaggtcattcagtatgtacaaaataagtacggggccatgcacgtcgcccagattatcaccttcgggacattggccgcaaaggcggcgttaagggataccgggagagtgttcggaatcagcccgaaagaagccgaccagcttgcccgcctgatcccgtcgaaaccgggaatgacgcttgaggaggcgaggcggcagtccgctcagctgaacaggcggctgtccgaatccgccgttcttcataaagtgtttcagatcgcaaggaaaatcgaaggtcttccgagacacacgtcaacacacgcggccggggtcgttctcagtaaagagccgctttcggaagttgtccctcttcaagaagggcatgacggcgtgtatttaacgcagtatgcgatggatcacctggaagatctcggtcttttgaaaatggactttttaggtttgcgcaacctgacgcttattgaatccattaaaacgatgattgaaaaagagacgaatacgaaaattgatttttccgagatttcttatcaggatgaaaaaacgttctcgctattgtcaaacggtgatacgacgggtattttccagctggaatcatcaggaatgagaaacgtgctgaagcgcctgaagccgtcaagactggaagacattgtcgcggttaacgcgctttacaggccgggaccgatggaaaatattccgttatttatcgatcggaagcacggacgggcgcgtgtggaagtgccgcacgaggacgtaagaaatattctcagtgacacttacggcgtcatcgtctatcaagaacagataatgatgatcgcctcgcgcatggcagggttttcattaggtgaagcggatctgctcagacgggctgtcagcaaaaagcaaaaggacattctggacagagagcgaagccattttgttgaagggtgcttaaaaaaggagtattctgtagtcactgcaaacgaggtctacgatctgattgtaaaattcgctaactacggattcaacagaagccatgctgtcgcatacagcatgatcggctatcagctcgcctatttaaaggcgcattatccgctatattttatgtgcgggctgttgacgagcgtcatcggcaatgaggacaaaatatcgcaatatctgcatgaagcgaaggggagcgggattcaagtccttccgccgtcaataaacaaaagcggttttccgtttgcgccggaaaacggagccgtcagatacagtttgcgggccgttaaaaacgtaggcgtctcggcagtgaaagatatttataaagcaagaacacataaaccgttcgaggatcttttcgatttctgctttcgcgtacctgcaaaaagcgtgaatcggaaaaccatcgaagcccttatattttctggcgccatggacgaattcaatcaaaatcgcgccgccttgctggcctccgttgatgtggctttagagcacgctgaactttttcgtgcagacgatgaccaaatgggattgtttttggaagaatcgttttccattaagccaaaatatgtagaggctgaggaatttccgctcgtggacaagcttcggttcgaaaaagaagctctcggtgtttatttctcaagccatcctttgtctgctttcagggatctcctgaaaaaacggggggcgcaaacgatcacagcagcgcggcagatgccgaagggacagctgtcaatcggcgctttgctcgcgggcattaaaacgattcggacaaagacaggtcagcatatggcgtttctcacattaagcgatgaaacgggagaaatggaagccgtcgtgtttcctgaccaatatagaaggctgtctccgctgttaaaagaaggcgcgcttttattcgccgccggaaaaatggaagagcgtcaggagaagacacaattcatcatgtcatccgcctctcttcttgaacagacggaggcagacagagcgccgtctgtttacatcaaaatcgaaggcagccggcacaatcaggagtttttggaaaagatgaagcgtattttactggagcataaaggggaaaccggcgtttatctatattatgaaaaagacaagcagacgatcaggctgccggatacttttcatattgaggcggaccatcaggcgttataccgtttaaaagagctgctgggccgcgaaaacgtcgtgttaaaatagtggtaacaataatcgttttgttatacaattgaaacaattgtgctatcttatttaaagattctgaaatttttcacctccagcgattgtaccagtctatgcggcagaatatgtaacaaagtacttaaaaggagtgtttagaatgtcattaagagaagaagcgttacatttacacaaagtaaatcaaggaaagctggaatcaaaagcaaaggtagaagtcagaaacgcggacgacttaagccttgcctactctcccggagtagctgagccttgtaaagagatttatgacgataaaaataaagtatatgattatacaatgaaggggaacatggtagcagtcgtaacagacggatcagccgttctcggtctcggtaatatcgggcctgaagcttcacttccggtcatggaagggaaagcggtgctgtttaaaagtttcgcgggcgtggatgcattcccgatcgcgcttgacacaaacgatgtggacaaaatcattgacactgtgaagctgcttgaaccgacattcggaggtgtcaaccttgaagatattgcggcgccgaactgcttcattatcgaagagcgcctgaaaaaagaaacaaacattccggttttccacgatgatcagcacggcactgccatcgtaaccgttgccggacttgtaaacgcgctgaaattatcaggaaaatccatgtcatccattaaagttgtggcaaacggagcgggagcggcaggcatcgcgatcattaagcttctttaccatttcggcgtacgcgacatcgtgatgtgcgactctaaaggagcgatttacgaagggcgtccggccggcatgaacgcggtgaaaaacgaagtggccaagtttacaaaccaagaccgcaacgatggctcgctgcaggatgtcattaaagatgcagacgtctttatcggcgtatcagtcgaaggcgcgctgacgaaagaaatggtggagagcatggcgaaagatccgattatcttcgcaatggccaacccgaatccggaaatcatgcctgaagacgcgcgcgcagccggcgctagcgtaatcggaacaggccgttctgatttcccgaaccaggttaacaacgtgctggcattccctggaattttccgcggggcgcttgacgttcgcgcgactcacatcaacgaagaaatgaaaattgctgcggttgaagcgattgcttcccttgtttcagaggaagaattaagcgctgattatgtcatcccggctccgtttgacaaacgcgtggctcctgccgttgcgaaagctgttgcgaaagcagcgatggaaacgggcgtcgccagaattacggtcgatcctgaagaagtggctgaaaaaacaagacagctcacagtcatcggggaataataacacaaaaatgaaatggcagcgcgttggaaaaaacaacgcgctgctgttcaatatacggactgctggcatttttttaagggcaggtcttaaaaaaatttcagcagaatccttatttcttttgaaaacgctgacagataaggctgaacaacgctttttacggtatgaaatccgtccgtttccgtctgttttgcagcaaaaaatgtcgaatggaggatgacaccgtttgacaaaaaaagtacaatagtttcggtaaagttattattaagtctatctaatcggaagacatgcagtgaagagaacccttcacaaaagggaggtaatcatttgttaaaggatatattcacaaaaaagaaaaaatatgcttccgtgccgtctgagcaggcaaaacatgatgttccggaaggcattatgacaaagtgccccaaatgtaaaaaaatcatgctcacaaaagagttagataaaaacctgcgcgtctgcatgaactgcgggcaccatttcccgatgaatgcaaagcagcgcattgaaagcctcctggatgaagattcattcgaagaattcaaccagggaatgatatctgaaaacccgctcggtttcccggaatacttagaaaaaatcgaaaaagaccgtgagaaaacatcgctgaatgaagcggtggttaccggaaaaggaaccatcagcggattccctgccgtgatcgcgatcatggattcaacattccgaatgggcagcatgggttcggttgtcggcgaaaaaatcacgcttgcaattgaaaaagcaaaagaggaaaaagtcccgtttatcatctttaccgcttccggcggcgcacgtatgcaggaaggggtcttaagtcttatgcaaatggcaaagacaagctctgcattaaaactgttcagtgaggagcagggactgattatttctgtcatgacccacccgacgacaggcggcgtatcggccagtttcgcgtctctcggtgattataatttcgctgaaccgggcgccttgatcggatttgcaggaagacgtattattgaacagacgatcggggaaaaactgccggaagatttccagacggcggaatttttattaaagcacggccagcttgatgcggtgattcaccgaaacgacatgaaagagaaactcgcatttctgctggacatgcaccaaacaggaggtgagcatgagtggctgcaagattagaatttgaaaaaccggtgattgaactgcagacgaaaattgccgaactgaaaaaattcacccaagattcggagatggatttaagcgctgaaatcgcaaggcttgaagaccggctcagcaagctccaggatgagatttataaaaatctgaagccgtgggacagagtgcagatcgcacgccttcccgaccggccgacgacgcttgattacattcaatacctgtttaccgacttttttgagtgtcacggagacagaacatacggagatgatgctgcgattgtcggcggagtcgccaaatatcacggcatgccggtcaccgtcatcggacatcagcgcggaaaagacacgaaagaaaaccttgtccgcaatttcgggatgcctcaccctgagggctaccgcaaagcgcttcgtctcatgaagcaggcggataagttcaaccgcccgattatctgcttcatcgacacgaaaggagcgtacccgggtaaagcggcggaggaacggggacaaagtgaagccatcgccaagaacctgttcgagatggccggcctgacagtgcctgtcgtttgtatcgtcatcggggaaggcggcagcggaggcgcgcttgcgttaggtgtgggcaaccgcatgctgatgcttgagaactcgacgtattccgttatttctcctgaaggagccgcgtccattttgtggaaagactccagccttgcgaaaaaagcggccgaaaccatgaagattactgcgcccgatttattagaattaggaattattgatgatatgattaaagaagtgaagggcggagctcaccatgatatcaagcagcaggcgggctacattgacggtattcttaaagaaacgttaaaatctcttcttcgattgaacgccgaagagttgatctcacagcgctatgaaaaatataaagcaatcgggaaagtttcggttgaggatcaatatatcggggtaaactgaatagacgtgaagcctatggctcacgtttattttttgtgatttttgtgatattccttaaattttatttaaaaacaatttatttaattgtataataggtaaggtttcatgggagctcaggcgtcccttttcattgttttagggcaatgatcatgatatgtttaacatatatagttgctgaggtgaataggaaatgaagcgtataggagttttaacgagcggcggggattccccgggtatgaacgctgcggtgcgcgcggttgtgcggaaagctatctaccacgacgtcgaagtgtacggaatttataacggttattcaggattaatcagcggaaaaatagaaaaactggagctgggttcggtcggtgacatcatccaccgcggcggaacaaagctgtatacggccagatgtcctgaattcaaaacagttgaaggccgtgaaaaaggaatcgaaaatttaaagaaactcggcattgaaggtcttgtcgtcatcggcggagacggttcatacatgggtgcgaaaaaattaacggaacacgggtttccgtgtgtaggtgtaccgggtacgatagataatgacatcccgggaactgattttacgatcggatttgatacggcgttaaacaccgtaattgatgcgattgataaaatccgtgacaccgctacgtctcatgagcgtacatacgttattgaagtgatggggcgccatgcgggcgacattgctttatgggcaggtcttgcaggcggagcggaatcaatcttaattcctgaagcggactacgatatggaggaaattatcggccgtttgaagagagggcacgaccgcggcaaaaaacacagtatcatcatcgttgcagaaggggtaggcagcggggttgaattcggaaaacgcatcgaagaagaaacgaaccttgaaacacgggtatccgttttagggcacatccagcgcggcggatctccaagcgcttctgaccgggttcttgcaagccgcctcggcgcttacgcggttgagcttctgcttaaaggaaaaggcggacgctgcgtaggtatacaaaacaacaagcttgtagaccatgatattatagaaattttagaatcaaaacatactgttgaaccaaacatgtatcagctttcaaaagaactgtctatttaaggcggaagaagctgaagatttcagaaggaagtgaacgagttgaaaaaaacaaaaatcgtttgtacaatcggtccggccagtgaaagtgtagaaatgctgacaaaattgatggaagcgggtatgaacgttgctcgtctgaatttttcacacggtgatttcgaagagcacggcgcaagaatcaaaaacatcagagaagccagcaaaaagctcggcaaaaacgtggggattctcctcgatacgaaaggtccggaaatccgcacgcacgatatggaaaacggcgcgcttgagcttcaggcgggaaatgaaattatcgtttctacgaaacaggtgctgggaacgcttgaaaaattctcagtttcttatgaaggcctggcagacgacgtgtcagcagggtctatcatcctgctggatgacggtttaatcggattggaagtgctggaatcaaatccggaaaaacacgaaatcaaaacaaaaatcttaaacagcggcacgctgaaaaataaaaaaggcgtaaacgttcccggcgtcagcgtcaaccttcccggaattactgaaaaagacgccaaagacatcatattcggtatcgagcaaggcgttgatttcatcgctgcgtcatttgtacgccgttctacggatgtcctggaaatccgcgaactgcttgaagagcataacgcgtctgacattcaaatcattcctaagatcgagaaccaggaaggcgtggacaacctggatgcgatcctggaagtatctgacggcctaatggtagcgcgcggagacctcggcgtagagattccggccgaagaagtgccgctcgtgcaaaaagaaatgatcaaaaaatgcaacgcgctgggcaaaccggttattactgcgacacaaatgctagacagcatgcagcgcaaccctcgtccgacacgtgctgaagcaagtgacgttgccaacgccattttcgacggcacagatgcgatcatgctttccggtgagacggctgcgggacaatatcctgttgaggcggttcaaacaatgtttaacatcgccacacgcacggaagaatctctgaactataaagaaattctgtctaaacgcagagatcaggtcggcatgacgattactgatgcgatcggccaatcagttgcgcacacggcgatcaatctgagtgcggcagctatcgtgacgcctacagaaagcggccatacggcgcgtatgatcgcgaaataccgtccgcaggctccgattgtagccgttacggttaatgagtctgtatcacgcaaactcggccttgtattcggtgtattcccgtcaagcggccaaaacgcgaattctacagatgaaatgcttgaagacgcggttcaaaaatcacttgacagcggcatcgtgaaacgcggtgatctgattgtcattacagcaggttctgtcggtgaatcaggcacgacgaatctgatgaaagtccacactgtcggcagcattatcgcgaaagggcaaggcatcggacgcaaatctgcattcggtccggtcgttgttgcaaaaaatgcgaaagaagctgaacaaaaaatgacagacggcgcagtattggttgcttcaagcactgaccgcgacatgatcgcttcacttgaaaaagcatcagcgctcatcactgaagaaggcggtctgacaagccatgcagccgttgtcggtttaagcttgggcattccggttatcgtcggccttgagaacgcaacttcagttttaacagaaggacaggttatcacagttgacgctgcccgcggcgctgtgtatgaaggccgcgcaagcgttctttaaacagctttaaaaaagagaggggggttctcccttctcttttgtctttaggttgattttcctattcccatgcgggcggtgacgcgcttttagaagggcaggagggcagaaaaatgagagtgttattcttactgtttatcgtatgtccggcaattgaaatcggtttgtttctgctggcgggaaaatggctcggtatttttccgaccttccttctcatcattttgacaggcgtgttaggcgctttggtggcaaaaagacagggaaccgatgtgtatcatcgggtgatgcgcgacctgcagcacggcaaaatgccgggggaagcgcttcttgacggaatatgcgtctttttcggaggcctgcttttgatgcttccgggttttctgtccgatattgcaggggcctgtcttctgattccgttcactcggaaccgcatgaagccgtttttgttcaaatggctgagagggatgtcaaaaaacaagcggatcattatcaaataaaaaacggcagccttcttacagggctgctgtttttatttggattgaacagtaatataggcccatatttcttttagagcgcccgttgtgataaaggcctgaatgaaaacgagcagcgcgggcccggcagccagtcctaaaattccgaacaatttaaagccggcaaacagggcgattaaggtcgcaagcggatcaagtccgattgacttgcttaaaattttcggctccgtcagctggcgctgaatgagaaccacaatatataaaacaccgagaccgatcgcttgaggaagctgaccggcaatggccaaatacataatccagggaacaaagaccgacccggcgccgagatacgggagcagatcaaccaggccgataaaaaaggcgatggttgccgcatgctcaatccctaaaagaaaaagtccgataaagacaatgatcatcgtgaaaagtatgagcacggcctgcgccttaatgaaacctgccatcgcttttttcagctctcccgatacggccttggcgtttgccgaaacccgttccggaaaaatggaataaagcagcgccttcagcttatgccagtcctttgtcataaaaaaagtcgccagcattgcgaaaatgaagacggcagctgtattgggaaggaaggcaatccatttcggcaccagctccaaaagatgtgaaagcatgagccccgcatttttagcggctgtatcaccgagggtctgaatatgcgtcacgatggaagcctgctgattggtttccagcccgttaaataggacggtcagctcgtggtacaatggctgaatgcgggaagtgaacagctcttcgcaatacgtcataaaggcgctgatatggggagggagcgttttggccagataggcggttcccgaaatgatttccgcaacgagaaatgttgccgcgccgagaagaataagcaaaaagaagaccaggacaatgactgtattgactgaccggggcagccccgtcagtttgtccagccagtcaacaacgggaatgatcgctgatgacagaataagggcgatcagaaacggataagttaacggaaatgaggcgtaaccggccgctaaagcgccgccggccgcagcgagtacaaacagcgcgcggaaaaaaacagttgcatagtgcggattcacatcgatcctcctctcggtcggcacgtcctattacattagtttattcgtcaaaaaaaaggatatgattacagatatgatgaaagagggtgctttcaggatgtttacacaggcgaatttatttttactattattgctggccatcgcattggtagccaaaaatcagtcattgctttttgccgtcggctttctcattgtgataaaagctgtcggtcttgatcagaaactatttccggttattcagtcaaaaggcatcaactggggggtcaccgtcattacaatcgccgttttagtgccgattgccacaggtgatatcggttttaaacagctcggagaagcgatgaaatcatattatgcgtggatcgctctcggtgccgggatcgcggttgccttaatcgccaaaaacggtctcaccttattggaaaacgaccctcatattacaacggcgctggtcatcggcacgatacttgccgtcgcgcttttcggaggcgtcgccgtcggcccgttaatcggcgccggaatcgcctacttggccatgcaaatcgttaaaatattcacttcataaagtaaaaaagcggcgtaaagctgcttttttttgcgggtgaaaataagagtttgcagggcattttgtagttcagacaaatgccatttgcattattccgaggaatgaagtggcttaccatgtaacaaagaacttcggaatcgccggcgcatattgtgcgatgacagcggatgcagtaaggcggttccaattgatgaatggattaaaagctgatggaatttatgcacttgaaccaaatcaaaacttgaagtgttgttaaaataagcggagaccctttccttcaatttgaaagtttgttaaatttataatgagaatgaaaaaacacaattcggttggtagtccggatgcattatttaaaatgtcagtaaccttcccctcctcgggatgtccatcattcttcagtaaatttaggaggagggaatcgttatgaaattaacggtttactacgatggtcagttttgggtaggagtcattgaagttgtgaatgatgggaaattaagagcagttcgtcatttgtttggaaaagagcccaaggattcagaaatcatgcattttgttcataatcaacttttacagactctctcccgcactgaacaaacaggggtttgtgttaaagcaaaatctaagaagttaaacccaaaaagattacaacggcaagcttctaaagagatgaaaaatatcgggatatcaactaaggcgcaaaaagcgataaaacaggagcttgaagcaagaaaagaaaagaaaaaacaactgaacagaaaacaaagagaaaaaataaaggaacaaaaatatttaatcagaaaacaaaaagcaaaagaaaagcataggggcaaatagttggagaacccgaagcccttcgattaaaaagttgagcggcatcagttttttcttcggactgatttagaaaaaagaagcagaaatcgagcccttctcgagatgaggagggtttttctgcatttatttaacttcacctacatcagtaaatgagtcagtttcaattgatgaacggtttgatgaggatatttacgggccgacaacagcgcaaatgcagtcaaacgattccagtccatgtacggggagccaactaaaaccaagacatggatttccgaagctgatccgaacattgattcagtcgagtaaacaaaatccccccttctccggtaaagaaggagggatttgcggtgaagttgttgcgcctgtccttttaaagtttccccaaagctccccccaaatgaaaacatgagaatacatggttttacaaagcatctgaaagcaagcgattaaatttatcaacgccaagccttgatatatagggcttttaaaacatttttagttaaaagtctacaaattaatcagattattgtttataataagaataggcttaaacttaaataagcttataagaatttgttatgttcctctataagcataccggttatgtaaccgcaaccagtgaaatgtaagcattttcttaaaggggaaagggattgtttgcatgactcattttaagtaagccgtatgttttatatactctttaaaggggaattttgattgaaaaggagaggttgaatatgacagcaacacgcggtcttgaaggggttgtagcaacaacatcatctgtaagctctattatcgacgatacccttacatatgtagggtacgatattgacgacttgacagagaatgcaagttttgaagaaatcatttatttgctgtggcatctgcgcctgccgaataaaacggaacttgctgaactgaaaaaacagcttgcgaaagaagctgccgttccacaagaaatcattgagcacttcaaatcctatcccctcaataacgtacatccaatggctgcgctccggacggcgatttcattactcggtctgactgacagtgaagccgatgtcatgaatccggaagcgaactacagaaaagccatccgtctgcaggcgaaagtgccgggcattgtcgccgctttctcaagaatccgcaaaggacttgatcctgttgaaccgaaggaagagtacggaatcgcggagaacttcctttacaccttaaacggtgaagagccttctccgatcgaagtggaagcgtttaacaaagcgctcattcttcatgcggatcatgagctgaatgcatcaacatttacggcgagagtatgtgtcgccaccttatctgatatttactcaggcatcactgccgcaatcggcgctttaaaaggaccgcttcacggcggagccaatgaagccgtcatgaaaatgctgacagaaatcggcgaagtggaaaacgccgagccttatatccgcagcaaaatggagaaaaaggaaaaagtaatgggcttcggacaccgtgtgtataagcatggagacccgcgcgccaaacacttaaaagaaatgagcaaacgcctgacgaatctgacgggtgaaagcaaatggtacgagatgtcaatccgtgtcgaagaaatcgtgacgtcggagaaaaaacttccgcctaacgttgatttctattccgcatctgtctaccacagtctcggcattgatcacgatctgttcacgccgatctttgcggtcagcagaatgtcaggatggatcgcccatattcttgaacaatacgataacaaccgcctcatccgcccgcgcgctgattacacgggtccggataagcagacttttgttccgcttgatgaaagagcctgatcaaacgggaggctggtgattttcatgtcgttagcctcttgttaatcaagcccggattggtttacaattttgatagaatcttgagaaaagtcattttattttttatacaagaaaaataaaatgttttctaaatatgaattacatactgggaggtaatattgtgtcacaaggtgaaaaaattacagtctctaatggagtattaaacgtaccaaataatccgattatcccgtttattgaaggcgacggcacaggccctgatatttggaatgccgcttctaaagtattggaagccgctgttgaaaaagcatataaaggcgagaaaaaaatcacgtggaaagaagtttatgccggtgaaaaggcttataataaaacaggtgagtggcttcctgccgaaacactggaagacatcagagagtacttcatcgccatcaaaggtcctctgacgacgccggtcggcggcggtatccgttctctgaacgtggcgctgagacaggagcttgatttgtttacgtgcctgcgccctgtcagatatttcacgggagtgccttctccggtcaaacgtcctgaagatacggatatggtcattttccgcgagaatacggaagatatttacgccggaattgagtatgcgaaaggttctgaagaagttgaaaagctgatcagcttcctgcaaaatgaaatgggcgttaacaaaatccgtttccctgaaacgtcaggaatcgggatcaagcctgtttctgaagaaggcacaagccgcttagtcagagctgccattgagtatgcgatcgaaaacggccgtaagtctgtcacgcttgtccacaaaggaaacattatgaagttcactgaaggggcatttaaaaactggggctacgagcttgccgaaagagaatacggagataaagtattcacttgggctgaatatgaccgcattgtcgaaaaagacggaaaagaagcggctgataaagcgcagagcgaagcggaagcggcaggaaaaatcatcgtcaaagacagcatcgctgatattttccttcagcagatcttgacccgtccgagcgaattcgacgtcgtggcgacaatgaacttaaacggagactatatctctgatgcgcttgccgctcaggtaggcggaatcggaatcgcgccgggagcgaacatcaactatgaaacagggcatgcgattttcgaagcgactcacggaacggctcctaaatatgccggccttgacaaggtcaacccgtcatccgtcatcctttcaggagtgcttcttcttgaacacctgaactggaatgaggctgctgacttgatcattaaatctatggaaaaaacgattgcttcaaaagtagtaacgtacgattttgctagattaatggacggtgcaactgaagtgaaatgttcagagttcggtgaagagctcatcaaaaacatggactgaacctaaagcagacttctaatgaagccaaaaaaggagaagagaatcatgggaaaaacacgcagtaaagtttctgttatcggagcaggatttacgggagcgacaacagcctttcttacagctcaaaaagagcttgcggacgttgtgctcgttgatattccgcaattagaaaacccgacaaaaggaaaagcgctagacatgctcgaagcaagtccggttcaaggatttgacgcgaaaatcacaggcacgtccaactacgaggacacagccggttctgatatcgtcgtcatcacagccggaattgcgagaaaaccaggcatgagccgtgatgatctcgtatctacaaacgaaaaaatcatgagaagcgtcacacgtgagatcgtgaaatattctcctgactgcattatcgttgtattgacaaaccctgttgatgcgatgacatatgcggtgtacaaagaatcaggcttcccgaaagaacgcgtcatcggacaatccggagtgcttgacactgcgcgattcagaacattcgtcgctgaagaattaaacctgtctgtaaaagatgtgaccggttttgttcttggcggacacggtgacgacatggttcctctcgtccgttattcctatgcgggcggcattccgcttgaaacgcttatcccgaaagaccgtcttgatgcgattgtagaacgcacaagaaaaggcggcggggaaatcgtcaaccttctcggaaacggaagcgcctactacgcgcctgctgcatcactgactgaaatggtagaagccattttgaaagatcagcgccgcgtgcttccgaccatcgcttacttagaaggcgaatacggtcatgaaggcatttacttaggcgtaccgacgattatcggaggaaacggcctggagcaaatcatcgagcttgaactgacagactatgaaaaagcgcagctgagtaaatcagttgaatctgtcaaaaacgtgatgaaagtattgtcataagaaaaaagggaaggcttccgaatcagaagccttcctctttttacaattaatgaaagcgttttctttttccctgagcgatcctttctctgaaaatgatcaaaaaggcgaattgtctgaacgggcagtattggataaaatgaaatcataaagtgatatgcagcacataaaatagagaaaattggatgtcggggaaaatagacagcggagggcgcagcatgaacaaaaaaattttagttgtagatgatgaacaatctatcgttactcttttacagtataatctggaacggtccggctatgatgtcataaccgcatcagacggcgaagaggctctggagctggcagagaatgaaaatccggatttaatcgtactggatgtcatgctgccgaaagtggacggaatcgacgtctgtaaacagctcagacagcagaaaatgatggttccgatcttgatgctgacagcaaaagatgaggaatttgataaggtgctgggactggagctcggagcggatgattacatgacaaagccgttcagtccgcgggaagtcactgcgcgggtgaaagccattttaagaagggctgacatttcttcgctgtcacaaggcagagaagaggaaaaggacgggcagatcctcatcggcgagctgaaaattcttccggagcattacgaagcgtacttcaagtcagaacagctggaattgacgcctaaagaatttgaactgcttctgtatttgggaaaacacaagggaagagtgctgacgagagatcttctgctgagcgcggtctggaactatgattttgccggggatacccggattgttgacgttcatatcagccatctgcgcgacaaaatcgaatcaaataccaaaaaacccatctatattaaaacaatcagaggtttggggtataaactggaggagccaaaaatgaatgaataaagtccgtgtgcgtctgttcgctttactcgttgtatgtatcatattggttttcagtgttctcggcctttttttacagcagcttatttcttcatccgctgaagaaagaacggcggatcagctgaaaaaggaatcggtatacatagcgggccttcttgacaccggccgaatcggcaataaaagcaatgaaacggtaatccgtgacgccggccgcaccctcggtataaacgtctccttgctcaacgagaagggtgacgccgtatatcattccggcagtcgtgctgatgattcagccgtaaaggagttcatttctcacaataaaagcgaggaagccgtacagtcgaaaagcagagtcatccgcggcactgccgtaaaaaatgacgcagggaaaattgcggggtatgtactcgtttcctcggatatcaacggcggttcaagcgttaccggagaaatgtggggcatgctggcagcaagtctttgtaccgcttttatcattatcgttttcttttatacaaacatgacgtcgcgttacaaaaaatcaatcgacgccgcgacaaaggtggcgacggagctgtccaaagggaattacgacgcccgctcctacagcggttacgcaaggcggtcggaccgtctcgggcgtgcgatgaacagcctggcggtcgatttaatggaaatgacaagaacgcaggatatgcagcgcgatcgtctgttaaccgtcattgaaaatatcggatccggtttgattttaatagacgggagaggttttatcaatctcgtgaaccggtcatacacgaagcagtttcatacaaagcctgaacgtctgcttcggcgcctttaccacgatgcgtttgaacatgaggagatcattcggcttgtcgaagacatttttatgacggagacgaaaaaatgccagctgctcagacttcccatcaacattgagcggcgctactttgaagttgacggcgttccgatcatgggccctgatgatgaatggaagggcatcgtcctcgtttttcacgatatgacggaaattaaaaaattggagcagatgagaaaggacttcgtcgccaatgtctcccatgaactgaaaacaccgatcacctcgattaaaggatttacggaaacactgttagacggagcgatgaaagacgaaaaggcgctttcagactttctgtctatcattctgaaagaaagtgagcggctccaatctctcgtgcaggatttattggatttatccaagatggagcagcaaaactttacgatgcgcgtagagtcctttgatgctgcaaaaattctgcatgaaattgaggcgcttttgcagcataaggctgaggaaaaaggcatcagctttcagctcgatctcccggaagagccgatttttgtgacgggtgatgcgcacaggctgaagcaggtatttttgaatctggcgaacaatgccctgacctacacgcctgaaaaagggacggtggggatttcggtacatgtgaaagaaaccgttgtcgatatcaaagtgtccgatacgggaatcggcattcagaaagaagagatcccgcggatatttgagagattctaccgcgtggataaagacagaagccgcaactcgggaggaaccggcctcggcctcgccattgtgaagcacttaatagaagcccatgaaggtaaaatcgaggtcacaagcgagcctggacagggaactgtgttcactgtgacgctgaagcggccgccggcagcgtgatcagctttacaaaggattaacaatttcttcatgacctgttaaacctatcttgttaggatataacagaaccccttcatccaaggagccaattttgacggcgggaacgcgttttcttgttcccgtccttttttgcgttttcacggggtccgctcattttcctttcaaattgaactttgttaaaataagagaagctgtgagattaaaaaacagaggaatgacgagcttttgctcttaggaggatattgaatgacggaacgaaaaaaattagtgcttgtcgacggaaacagtctggcgtaccgggcgttttttgcattgccgcttttaagcaatgaaaaaggcattcatacaaatgccgtatacgggtttgcgatgattttaatgaaaatgctggaagatgaaaaaccgacccatatgctggtggcttttgatgcgggaaaaaccactttccgccacagcacgtttaaagaatataaaggcggaagacaaaaaacgccgccggagctttcagaacagatgccgttcatccgcgagctcctcgatgcctacaacatcagccgctacgagcttcctgaatatgaagcggacgatattatcggcacgcttgccgtatctgctgaaaaagacggctttgaagtgaaggtcgtttcgggggacaaggacttaacccagcttgcaaccgggaaaacgaccgttgccattacgagaaaaggcattaccgacgtagaagattacacgccggagcacgtgcgggaaaagtacggtctgactcctttgcaaatcattgatatgaagggattaatgggagattcatccgataacataccgggcgtccccggcgtcggagaaaaaaccgcgattaagctcttaaagcagttccattcggttgagaaactgcttgattccattgatgaagtcagcggaaaaaaattaaaagaaaagcttgaagaatataaggaacaagccctgatgagcaaagagctggcgacgattatgacaaatgcgccgattgaagtcaagcccgaagatttagattaccaagggtttgaccgtgaacaagttgttgccatttttaaagacctcggttttaatacgcttcttgagcggctcggtgaagaaagcggggaaacggcggaagaaaattttgaagacatcaatgtcgaaacagcagaagaaatcaccgaagatatgctcgtttcgccgtccgctttggtcgtcgaacaaatcggtgataactatcacgaagaaccgatcctcggcttttccatcgtgaatgaaacaggtctttattatattccgaaagaaatcgccattcagtctgaagcttttaaatcttgggctgaagatgaatcgatgaaaaagtgggtgttcgacagcaaacgttccgtcgtcgctttgcgctggcagggaattgagctgaagggaacggaatttgacgcgcttcttgctgcctacattataaacccgggcaattcgtacgacgatgtcgcgagcgtagcgaaagaatacgggctgaatatcgtttcaaaagatgaagcggtatacggaaaaggcgcaaaacgcgccgttcccgctgaaaaagagcttgccgatcatctcgcgcggaaagcgtctgccgttaacagcctccgtgacaaactgcttgacgctttggaagaaaataatcagcttgagctttatgaagatcttgaactcccgcttgcgctaattctcggagaaatggaatcaatgggcgtcaaagtggatgtggaaagactgaagcgaatgggagaagagctcaaggcaaaactgaaagaatatgaagaaaaaatccatgacatcgccggtgagccgtttaacatcaattcaccaaaacagctcggcgtcattctgtttgaaaaactcggcctgccgccagtaaagaaaacaaaaacaggctattccacttcagctgatgtgcttgagaagctcgcagacaaacatgatatcgtcgcgtacattctgcaatacagacaaatcggcaaactccaatcgacttatattgaagggctgctgaaagtcacgcgcaagggttctcataaggtgcatacacgattcaatcaggcattgactcaaaccggacgcctcagctcaacggatccgaacctgcagaatattccgatccggctggaggaagggcggaaaatccgtcaggctttcgtaccgtccgaaccggactggcttattttcgccgccgattattcacaaattgaattaagggtgcttgcgcatatttcaaaagatgaaaatctgatcgaagcgtttacgaatgatatggacattcacacaaaaaccgccatggacgtgtttcatgtcagtgaagatgaagtgacacaagcgatgcgccgccaggcaaaggccgtcaatttcggcatcgtttacggcatcagtgattacgggctgtcgcaaaacctcggcatcacccggaaagaagcgggcgcttttattgaccgctatttggagagcttcccgggcgtcaaggcgtatatggaagaatcggtgcaggaagcgaaacaaaaaggatatgtgacgacacttatgcagcgccgccgctatatccctgagctgaccagccgcaacttcaacctgcggagctttgcggaacggacggccatgaatacgccgattcagggaagcgccgccgatattattaaaaaagccatgattgacatggcagctgagctgaaagaaaaaaacctgaaggcgcgactgttgcttcaggtgcacgatgaattaatttttgaagcgcctaaggaagaaattgaaatattagagaagctggttcctgaagtgatggagcatgctttggcattagacgtgccgctgaaggcggattatgcttcagggccgtcttggtacgatgcaaaataaacagaaaaaaaggaagtgatgattgtgccggaattaccagaagttgaaacggtccggcgcactctgaccggtcttgtgaaggggaaaacgattgaatcggcggatatcagatggccgaatatcatcaaaaaacccgccgagccggaggaattcgcgcggcagattgcaggagaaacgatccgatccatcggaagaaggggaaagtttttgcttttccatttggatcattatgtcatggtgtcacacctgcgtatggaggggaaatacggtcttcatcaggccgatgagcctgacgataaacatgtgcacgtcgtgtttcacatgacggacggaacacagctccgctaccgggatgtccggaaattcggcacgatgcatttgtttgcgccgggagaggaacggaatgcattaccgctttcacagctcgggcccgaacccgatgatgaagcatttaccgccgcttatttaaaagagcggcttgcaaaaacgaaccgcgcggtaaaaaccgccctgctcgaccaaaaagcggtcgtcggcctcggcaatatttatgtcgatgaagctttattccgggcgcgtattcatcctgaaacaaaagcgaacagtctgtcggacgggcagataaaaacgcttcatacagaaattaaagacacccttcaggaagcgattgacgcgggcgggagcaccgtccggtcttatatcaattctcaaggggagatcggaatgtttcagctcaaacattacgtctacggcaaaaaggatgaaccgtgcaaaacgtgcggcacgatgatttctaaaatcgtggtcggcgggaggggcactcatttttgcgcccgctgccaaaaaaaatcataaactgaagctgttcaagcaggcggcagcagaatgacttttttctaacacagttgatgacctttctccatatatatattgtgattcacccaataggcatatgtcacaattgccgatcaagagaaagggagaaacggatatggagattgtttctttgctgcttttggcttttgctgtcagcttggacagtttttcagtcgggtttacgtacggtttgagaaaaatgaaaatcccgttcaaagcgattgccgtgatcgcctgctgttcagcctctgtgatgtttatatccatgctgatcggccattttctgacaaagatttttcctgtatccgtcacggagaaactgggcgggctgatcttaatcggaataggggcatgggtcatctggcaattttttaaaccggctaaagagccggattacttattgcatgaaaaaacgctgcttaatcttgaagtgaaatcgctcggcatcgtcattcatattttgaaaaaaccgaccagcgccgatattgatcaatccggaaccattaacggagtcgaggcgcttctgctcggtatcgccttatccattgacgcgtttggcgccgggctgggagcggccattctcggcttttctccggttatgatgagcgtgactgtcggggtgatgagctcgctgtttgtttcactcggcataaacgcggggcatttgctttcaaggtggaattggatagataaaatgacatttttgccgggagtcctgctgattatcatcgggatttggaaaatgtaagaaggagtgggctttttgagcttggtcatcggtttaacgggaggcatcgcaagcggcaaaagcacggtagcgcgtatgctgatcgacaaaaaaataacagtcattgatgcggatgtcatcgcgaaacaggcggtggaaaaaggaatgccggcttacggacaaattgtggaagcattcggaaaagacatcctgctggaaaatggcgatattgacagaaaaaaactcggttctatcgttttcactgacgaacagaagcgtctgaagctgaatcagatcgttcatccggcagtgcgtgcggaaatgctgaaacagcgggatgaagccattgcgagaaaagagcagttcgtcgttttggatataccgcttttgtatgaaagcgggcttgattatcttgtcggcaaagtgctcgtcgtcaccgtaccggcagacattcagctcaaacggctgatggagcggaattccctgacagaagaagaagcgatgagccggataacgtcgcaaatgcctttagcggacaaagcaaaaaaagctgacgccgtcattgataacagcggcagtcttgaatatacaaagcaccagcttgaggaagtattgagcggctgggcataaacaaacaccgttcggaaagccgaacggtgtttttctggttaaaaatcaaaattgtcagggtccggaccgacacggagattttcgttcagatcatcaatccgcttcatatcttcagctgacagttcgaaatcaaagacatttgcattttcttcaatacggtgttttttagttgatttcggaatggtgatgacaccgttttgcaaatcccagcgcaaaatcacttgagcggctgatttgccgtatttctcagcaatctcctgtaatacggggtgatcaagcagctgcccttgcatcaatggcgaccacgcttcaagctgaatgccttgttcagtgcagaaagcaagcagttctttctgtgtcaggcgcgggtggtactccacctggttgatcatcggcttgatttccgtttctttcatgagatgtttcaggtggtgaatttggaaattgctgaccccgatcgccttaatgcgtccatcccggtagagggtttcgagcgcccgccacgcatcgatgtactttccttcgacaggccaatggatcaaatataaatctaaataatctaaaccgagtttttctaagcttgtgtcaaacgcttttaacgtttcttcatatcctaaatcggcattccatacttttgacgtgacaaaaatgtcttcacgttttaatcccgcttcttgcagcccttggcggatcccttcgccgacaccttcttcatttccgtaaatcgcggcggtatcaacgctgcgatagccgtgcaccaatgccgttttcaccgcgttgacgagttccgcgccttcctctactttgaaaactccgatgccgaaccaaggcatctctactccgttatgcaatgttgcttttgcttgtaaatgtgttgtcatgtatatattcctcctattatttgtctgtcgaaaaaaatcaaaatgcgctgaagaaaaactcacctcctttcaagggcagtgcgatcccgcttttccagcttcctgctccatccggttaatacgaccgcgctgagcaccatcagcgccccgatccaagcggtatgaatgattccgattgagtctgtaatgattccgccggcaaacgagccgatcgcgattccggcattaaatgccgcgatatttaaggctgatgctgtatcaacggcgcttggcgcaaaacgttcactcagcatcacgacatatacctgaagccccggcacattcataaacgccaacagccccatgaaaataatggtgatcagcccggctgttttaaacggcgcggtaaaagtcaggacaaacagcacagctgcctggacaatgaacatataaaacaaggctttcagcggattccggtttgataaacggccgccaatcatgtttccgatggcaatcgcaattccgtaaatgagcaggatggccgcgacggtttctttctgaaaacccgttacctcctgaagaagcggagataaatacgtaaacacgacaaacgttccgccgtagcctaacgctgtaataataaataaaagcaataaccggccgtttgtgacgagtttgacctgctcggaaaatgcggttttcgtccctttgcgcaaatgagacggaacgagaagcgcgtttgtgaggaatgcgatgattcctaccgccacaatcacggcaaatgcgattctccatccgaattgctggccgagataggtgccgaacggaacgccggtcaccgtagccaccgtcagccccgtgaacataatggaaatcgcgcttgctcttttatgctccggcacgatattggcggcgatcgttgccccgattgacatgaaaatgccgtgggaaaaagccgaaatgacccgtgccgccagtaagacgccgattgaggaagcgctcgctgcgagtgtatttccggcgataaaaatcaacatcacccagagcagcagtgttttccgcgacatgccggatgtgagagacgttaaaaccggcgcgccgaatgtcacgcccagagcatacatggaaacggtaagtcccgccgttgtcacaggtatatgcagatcttgagatataagcggcagcagtccgacgctgataaattcggttgtgccgatcgcaaaagcgctgacggctaatgccagcagcgctggtaaatagctttggcgatgtgaagacatctgttttcctccttaaacgataatgtatggttgaaatgatgccgggtaaacgatataagtataagagtacattccttttcagccggcaaatgtcattatgattgatagaagtgtcattgaaaagaacgtacttttaagtgccataggcactttttagttcctatagatgaggaggaattaccgttgctgaagaaaaaatacaatatatccgtagaggcggcgcttgaagtgatcggcggaaaatggaagtgtgtgatcctctgccacctcatgcgcgggaaaaaacggacaagcgaattgaagcggcttatgccggacatcacccagaagatgctgacacagcaattgcgggagctggaagctgacggcgtcatcaaccggatcgtgtacaatcaggtgccgccgaaagtggaatacgagctgagtgaatacgggcacagtctggaaagaattttaaatgcgctgtgtgactggggcgcgatgcatattgctaaacggtacggcgaggtgtcttccgttttagaggacagcattttgaatgacaaatttaaagaaccgggacaaatataagaaaaaagcaggcagcctgagacgctgatcctgctttttttatggaagaaaaatcattttatatgcaaaaaaaccgattgaacaacatattgatcggtataagggtggatttttatcaagttgtactggcggatttcttttaatgtgttatactatatataaataaaggtaaattagagtggcatattaaaaaggggtgacctgagcatgaaggtaaaagtagcaataaacgggtttggaagaatcggaagaatggtgttcagaaaagcaatggaagatgatcaaattcaaataacagccattaatgcaagctatcccccggaaacgcttgctcatttgataaagtatgacacaattcacggcaaataccatcaagaagttgagaccgccgacgacagcctgatcgtcaacggaaaacatattatgctgttcaatcgccgggacccgagagagcttccgtggaaagaatgcggaatagacatcgtcgtagaggcaacggggaaatttaattcaaaagaaaaagcgatgagccatattgaagcaggggcgaaaaaagtcattttaacggctccgggcaaaaatgaagacgttaccattgtcatgggagtaaatgaagagcagttcaatcccgatgaacatgtcattatttcaaatgcatcctgcacgacaaactgtcttgcgccggtcgtcaaagtgcttgatcaggaattcgggattgaaagcgggctgatgacgactgttcacgcttacacgaatgatcaaaaaaatatcgacaatccgcataaagatctgcggagggcgagagcgtgcggagaatccatcattccgacttctacaggcgccgctaaagcgctgtcgctcgtgctgcctcatttgaaaggaaaacttcacggtctcgctttgcgtgttcccgttccgaatgtgtcattagtggaccttgtctgcgatctgaaaacagatgtgtcggccgagcaagtgaacgccgctttccaaagagcctcaaaaacgtcgatgtacggaattcttgattattcggatgagccgctcgtttcttcggattataatacgaattcacactctgcgatcatcgacggactgacaacgatggtgatggaagaccgaaaagtaaaggtgctcgcctggtatgacaatgaatggggatattcctgccgggtcgttgatcttatccgtcacgtcgccgcgcgaatgaaacacccgtcagctgtgtagactaaagatcatggacatttgttagaaaaaaacccttaacggcatattcgcaaaaaacacaccttgcaaaataaacttaaacacagtatactatctttcgtgaacttcttgctcgtgactgcttcggaattacttaaagggttaggacctctccggactaactttcccccgtggtaaatggccgggtcagttctcggaaattcacttttttaattcttgttaaggggggtccatgattatggaaacaatggggcgtcacgtcatctccgagctgtggggatgcgattttgataagctcaatgacatggattttattgaaaaaacgtttgtaaatgctgctttgaaatcaggagctgaagtgcgcgaggtcgcatttcacaaatttgcaccgcaaggcgtaagcggagtcgttattatctctgagtcacatttaacgattcacagttttcctgaacacggatatgcaagcattgatgtttatacttgtggagacctggatcctaatgtggctgcggattacattgcggacgcattacatgcagatacaagagaaaacattgaaataccgagaggaatggggcctgtacagattaaacaggcacaagcgaaagtactgtaattttcaaaacgcaaacacaagggagctaagctgaaaaagccattacgcgctttgaagctgatgctccttttctaatgtaaaaaaacagcattgctttttctttaagcattttttttgtaaaatagaaaagataaggccggtctatcggctctcccaacaaataggctcatcctagaaacgttggcgggcatttaccggaagcttgcgaaccgcattacagcaacgaaacagatgggagctgatccaatttgaaatgtccttcatgccagcataacggttcccgcgtacttgattcacggcctgcggacgaagggaaatcaatccgcagaaggcgggaatgcgaagcctgccattaccgcttcactacatttgagaagtttgaagagatgcctctgatcgtcgtgaaaaaagaaggcgtccgggaagaattcagccgtgaaaaaatgctgcgcgggttaattaaagcttgtgaaaaaaggcccgttcctttgaaaacattggaagacatgtgctttgacattgaaaaagagctgagaaaccaaggcgtatctgaagtcaaaagcgaacttgtcggtgaaatggtaatggaccgcctggcgaaaatcgatgaggtgtcttatgtccgctttgcctccgtctaccggcagtttaaggatataaacgtgtttatcgatgaattgaaagatttaataaagaaagaacgctgagagagctaagagattgtgtctggctcttttctcatgagcaaaattggcatttgatagatcgcagaaacggtgtaaaatgagagtagaaacatatcggaaggtttgagaatcatggctgactattggaatgacgtattgcctgtagatccttatacggtcaaaagccgttcgcttcttcaggatgtcgacagacaggttttgacacatctgtaccagccgctgatcggttcttttgcattctccctttatatgaccttatggggggagcttgagcagaaccgcttgtggggagcggaatccacgcacaggcagctgatgggcatgatgcagtcaaatttaaaaaagattcatcatgaacagggaaagcttgaaggaatcggactgctgaaagtgtatatccgggagtccgagcaaaaagagcggatgtttatttatgagctgctgcccccgctcaggccgaatgatttttttgaagacggcatgctgaatgtctttctttataacagagtcggtaaaacgaaataccagcagctgagacaattttacacgcacccttccgtcggcgcgggcgcaagggaaattacccgtccgtttaatcacgcttttgcctcttttcagccgagtgaatggaaaatgacgcctgatatggaagaggcgatgaagctccccgaggactatgagacggcgtctgtcggacaagcgccttcctatacggtgacggaggaagtgtttgattttgagctgtttttggcggggttatcagaaacgatgataccgcgcaaatcaatcacacaggatgtgcgggagagcattaaaaagctttcatatttatacggaatagatcctatctccatgcagcacgtcgtcatgaccgcaattaatgagcaggatacgataacggccgaagcgctgaggaaagcggccagcgactggtaccaaattgaaagaagcggcaagcttcccgaactgattgataaaacacagcctgtcaccttgagagaaaaccggacggaaaaggacgattcattgaacggcgaactcatcgcacagcttgagaccatatcaccgagaaagcttctccaggacattgcggacgggaccgagccgtcaaaagccgacctgcagattatcgccgatattatgttcgaacaaaagcttgagcccggcgtcaccaatgtgctgatttattatgtcatgctgaaaacggatatgaagctgtccaaaaactatatccaaaaaatcgccgcccactgggccagaaagaaagtcaaaacggtacgggaagcaatgaagctcgcaatcgaagagcacaggcaatatcttgattgggcggacggcaaaacaaacggcgcggcgcgcggcaaaaaaaccgtccgggaagaaaagcgccctgattggatgaaagaagaagaaaccgggaagaaacaagaacagacggctctttccgcacaggatcttgaagaacagaagaaaaaaatgatggaagaaatgaaaaaactgaaaaaatactctgcctattgagacagagaagcggggtgatattgaatggaaccgatcagccgatccttagaaggcgtgacgaaaagacctgactttcaaaaacgcctggaacgaatgcagcagcaagttatggccgacgaagacgtccaggcttttttgaaggaacagaaagatgttatcaatcaaagcatgattgacagagggttaaataaactgtacgaattcgttcagcaaagtaaacagtgcgccttctgttcgaaagacagccggacgaacagcctgcttgaaggctaccatccgaagcttgtgatcaacgggcgttccattgatattgaatattacgaatgtccggaaaagagaaagctcgaccgccagaaaaggcaaaagtccctgatgaagagcatgtatatccagcaggatcttctcggcgcgacgtttcagcagatcgacattaccgatccgagcagactcggcattttccagcatgtgacggattttctgaagagctataatgaaacgggaaaaggcaaagggctgtatctgtacggaaaattcggaatcggaaagacatttattttagccgccattgccaatgaactggcggaaaaagagtattcatcaatgatcgtatatgttcccgaatttgtcagagagctgaaaaactcgcttcaggatcagtcgctggaggcgaaactgaatatggtgaaaacgacgcccgtactgatgcttgatgacatcggagcggagtcaatgacaagctgggtcagggatgaagtcatcggcaccgtgcttcagcacagaatgagccagcagcttcccactttcttctcgtctaatttttcaccagacgagctgaagcatcattttacgtattcacagcggggagaaaaggaagaagtaaaagcggcaagactgatggagcggattttatatttggcttcgcccgtccgtcttgacggggaaaaccgccgccgttcatgatgccggcgtccaatgggaaggatttgagggaatgaggaataagaaggctgtcacttgggctgcggctgcggcgggagcgggtcttttgctgtgggcaaaccgcaaatatctgaatctgtcgcctaaggagatccggctgtgggtgttatcgttcggtgtttttgcgccgcttgtgtttatcggaatttccatcgtcaggccttttgtgctgtttcccgtatcaatcgtttccgtcgccggaggattggcgttcggcccgtttttcggcaccatgtatacgctggcgggctcaatgggcgctgccgccgcgtctttttttgcggcggggctgtttgcctttaatgagaaaagccgtcatggaaaaatggaagccattcaaaagcagatgaaaaccaatggcttcttttatatttttatcctgcgcattctgcctgttaactttgatgtgatcagctatgccgcgggcctatcgaaagtcaggccggtaacgtattttttggcgaccgcagcgggcatcattccggggacgatcgtcctgaatgtgctcggcgcgagctttatgtccggcaatgtgctggccgtactctgcgtgatctgtctttacgtcgtatttttatcgcttcccgttatatttaaaaagaaggtgcgtcatttgttcggcggtgaaagctaacctttacgtctattttaaaaacatcccccatatacttgtaacagatgccgtaaggggggacaaatatgcttgaagtgatctttgaagatgaccacgataccgccgcttttttacatctcattcagcaatcggacgaccggagacattttattgtccgtgaaggcataaaaaaagtcggaatcgcaaggtctgaaacggctttttgcgttcagcgctttattgagccgatacttgtcaggttttttttggaatgcaaagaagacgagcatatgctttcgcttattgaggacgcatactgcttcaccgatcaggatgaacagcagcaaatccttcagcttgcacacagcattatggaaggagagcttgaggatcatccgtttgagccgaagaaagagccgcgcacacagtttatttcagatgcgctccgaacgatttcacttgatgcgggtgttttttccgtgcgttcgtttcagacgttccggctcggcaggtattatgagaggctcagagaatatacggaggccgcgatagatgaataccggatggaacaggaatatcaaaactttatccagtctctgagagattatgtgacatccaatccgccgcggatgaagaaagtccgcatcgtacatgaccgggcttttacgctgtgggagctgcgctatgtgtctgaacgggaacagaaaaaatacatagacagacggtttgtgcgggagcacccgatgtatatagattcccatctccttgcgccgctgatctccattgcgcctgagacggtcgaactgtatacggacaaaccggaacatatgatgtcaagaaccattcaaaacgtgtttcaggagagggtgcgcctttttccgctgggcgcgtttgcagccgagaagacggaaggatagccgcacggacggccttgtgtaagcggcagggctgtctgtgcgaaatcagacggaaaaccgagttgcatttttctcacagacattttataatacataaaagattaatgattgctacacgtattgataaggacatgaagcattgataccggctgtataagagaggagagcccaggctgaaagctttccagctatggatcattgtctttaccgcctttgaacttcagctgtgaacgccggaataagcgccagtaatagctgacgggaactcccgttacagagcttagagccgcagtgccgaagcaatcggccgcgcggaaaaaagggtggaaccacgattccgtttatttaacctcgtccctttcatagggggcggggtttttgatttgcataaaaaaaggagtgacgaagatgtcagatatgatcaacatcacatttccggacggagcggtaaaggaatttccgaaaggaactacaacagaagatatcgcggcatccatcagtccgggattaaagaaaaagtctttagccggaaaactgaacggacaggaaattgatttaagaacgccgattcaagaggacggtgccgtagaaatcattacagaaggcacagaagaaggtttgaacatcatgcggcacagcacggcgcatttattggcccaggcgattaaacgcatttataaagatgtgaaattcggagtcggccccgtcattgaaaacgggttctattatgacgttgaaatggagcaggcgctgacgccggatgaccttccgaagattgaaaaagaaatgaaacgcatcatcggtgaaaatctgccgatcatccgaaaagaagtgagccgtgatgaagcaaaagccatgtttgcggaaatcggcgataatctgaagcttgaactgctggatgcgattccagaagacgaaacggtctctatttatgagcagggcgaattttttgacctgtgccgcggcgtgcacgtgccgtctacaggcaaaattaaagaatttaagctgctgagccttgcgggcgcatactggcgcggcgacagcaaaaaccaaatgcttcagcggatttacggcacggctttctttaaaaaggatgacttgaaagagcatttgcgcatgcttgaagaagcgaaagagcgtgaccaccgaaaactgggcaaagaattaaaattgtttgccaactctcaaaaagtcggacaaggtctgccgctctggctgccgaaaggcgcgaccatccgccgcgtgatcgagcgctacattgtggataaagagctgagcctcggttatgagcatgtgtatacgcctgtcctcggaagcaaagacctgtacgaaacatcagggcactgggatcattatcaggatacaatgttccctccgatggaaatggacaatgaaacactcgtgctccgtccgatgaactgtcctcaccatatgatgatttacaaacaggacattcacagctaccgcgagcttccgatccgcatcgccgagctcggaacgatgcatcgttatgaaatgtccggggcgctttcaggtcttcagcgcgtacgcggcatgacgttaaatgacgcgcacattttcgtccgccctgatcagattaaagaagaattcatccgcaccgtccgtttgattcaagacgtatacgaagacttcggactgagtgattacacattccgcctgtcttaccgcgatcctgaagatacggaaaaatattttgatgatgatgagatgtggaacaaagcgcaatccatgctgaaggcggcaatggatgagatggggcacgactattatgaagcggaaggcgaagcggcgttttacggccctaaacttgacgtgcaggtgaaaacggcgatcggcaaagaagagacattgtcaactgtacagcttgacttccttcttccggaacgctttgatctcacttacgtcggagaagacggcaaacagcaccgccctgtcgttattcaccgcggcgtcgtatcaacgatggagcgtttcgttgctttcttaatcgaagagcacaaaggcgcccttccgacatggcttgcgccggtgcaattccaagtcattcctgtatcaccgtccgtgcatcttgactacgcgaaaaaagtgcaggagcgcctgcagcgcgaaggcctgcgtgtcgagcttgacagccgggacgaaaaaatcggctataaaatccgtgaagcgcaaatgcaaaaaatcccgtacatgcttgtggtcggtgaccaagaagcggaaaacggcgcggtaaacgtccggaaatacggcgagcagaaatcagaaaccgtctcattggacgattttgtgaaaaaggctgtagcagaagcgaaaaaataaccggaaatacaaaaaaccccgttcattcagaatggggtttttttgcgtataaaattatctttctttttgtttctctataatcgcaaacagctcgtgaagatcgctgatcacgtaatcaggcgcaatgtccgtatcatttttcttttgtgtccggtttacccagactgtcgtaatgcctgcccgtttcgctcccaatatatcagtattgaggttatctccgaccataatggcgtcttcttttttcaggttcaggaggccgaggcaatgttcgaatatggaggcatcgggtttcccttttccgaaagcgcctgagatgacgatttcattaaaataaggcgcgagctcaggaacgccggctagtttttctttctgcaggctgggatcgccgtttgtcagcagaagcaattcataaacacctttcagcttatcaagcaccgcaaacgtttcatcatacacatacgggcgctgtctgcgttccgccgcgaaaaactccgccaaatattcgccgtaagccgcatcgtctataccgacgctttttaagccgttcgtccaggcgtttcgtctgtattccggcgcaatccgattcagctgtttaaatccttcgctgaccggctcggaaaaattcgcccataatccttcaaacggattaatgccgatcatgaccgtataaggataggtttcgtatgacatatacaattcccgtgccgctttccgtaccgcctcttcaaatgtttgcgggtcaaggccatattttttttccgcttgtaaacatgtttccctgaatgttgttctgacgcttttttcatcccataacagtgtatcgtccaaatcaaaaaatacggctttcatgatcttctcctctttgttatattctgaaactctctgccgcaaggctcccgtttattctacaatagatacatagactgtgaaagatttgttttcagatgatttgaaaaaaacaggcaggtttgtgtcagattctgtctcgggctctaaaacgtgataaaataaaatttgaaagaacaggtgaaaagtatgctgcatttgatcatcatgatgctggaaagagtcggaattatcgtcatattgggatttgttctggctcataccagattgttcagacaggcgctccagcagcctgagagctataaaggcaaagcggtgctgatttcaattttctcgctgttcagtatcatcagcaactatacgggaatagaaattcagcagaatacaatcatgaataatgactgggtgtttcaaattaatccgtccggttcaattgccaatacaagaattatgggcgttgaaatcggcggactcttaggcggcccctatgtggggatcggcgtcggcatactggccggcctgcatcgtttatcactcggcggcgcgaccgcagtcagctgtgccgtctcatccgttttagcgggcattttgtccggctggatcggacggtatttcagaaaacgctacaggatgccgacaccgcgtgtggccgcgcttgtcggactcgggatggaatcgctgcaaatgctgctcatcctcttgatggccaagccgttttctgacgcttggacgcttgtgagcatcatcggcatcccgatgatattggtaaacgggtcagggacttttatttttctttcgatcattcagtcgattatccggaaggaagaacgggcgagagcccttgaaacccacagggtgctgatgattgccgatcagacgcttccgtatttccgccaggggctgaatgaaagctcatgcaaaagcgtcgccgccatcattcacaggcaaacaggaacggacgcggtatcgcttacggataacgaaaagattttggcgcacgtcggcgcgggtgccgaccatcatattccgtctgaaagcctgattaccggattgtcaaagcgcgttattaaaacgggtcatattatgaaagcgacatcaaaggaagaaattgaatgcacgcacgatccctgtccgctgcatgcggcgattgtattgccgctgacgtcaaacggcaaaacgatcgggacgctgaaaatgtactttaaaagcccgtcaggtttaagccgggttgaagaagagcttgcagaaggactcgccatgctgttttccacacagcttgaactcggcgaggcggaactgcagagcaaattgctgaaagacgcagaaataaaagcgcttcaagcacaggtcaatccgcattttctgtttaatgcgatcaatacgatttctgctctttgccgtacggatgtagaaaaaacccgaaagcttctgctgcagctcagcgtctatttccgttccaatctccagggggcaaggcagctgctcatcccgctttctaaagaactgaaccatctgcaggcgtatttatcattggagcaggcccgttttcctgggaaatataaaatcagccttgaaatcgaacgcggtttggaggacatcgaaattcctccttttgtgctgcagattctcgtcgaaaatgcgcttcgccatgcattttcaagaaagcaggacagctgtgccgtcaatgtgagcgtggtatccgccggtcagtcggttttaatgcgggttggagataacgggcggggaattgatccggaattgctgtccgtgctcggaaaccgtccgctcccgtctaaagaagggacgggaaccgcgctttacaatttaaatcagcggctgatcgggctgttcggccccaaggcagccctgcgattggaaagtgaggccggcaaaggtacggacgtatcatttgagctgcctttgaaactgatgactaaaggagaagaacatgctgaaggtgttaatcgttgatgatgaaatgctggcaagagatgaattagcttatttgctgaaacggacgaatgaagtaagtgacataaacgaagctgaaaatattgaatccgcttttgacagtatgatggatcaaaaaccggatctgctgtttttggacgttgatttgtcaggagaaaacggatttgatattgccaaacggctgaaaaacatgaaaaatccgccggccgtcgtttttgcgacggcgtatgaccaatttgctttaaaagcttttgaagtcgacgcactcgattatttaacgaagccttttgatgaagaaagagtgcgccagacgatcagaaagtttaaaagagtgaagcaggacagggcaggagccgtctcggagctgccgtccgcagccggagcgcataaactggctgtatcagccggtgaatctattgtcattttagatacgaaggacattatttacgccggcatggaggacggacacgtttccgtcaaaacgtttgccgcgtcttattccgttcatgaaactttggcggtcattgagaaaaaactgcctgatacgggtttcttgagagtgcaccgcgcgttcatcgtgaatacggagcatattacggaaattcatccgtggtttaattcgacttacaatctgatattaaaagacggttctaaaattcccgtcagccgtacatacgccaaggacttaaaaaagctgcttcatattatatgaggcggcttttgcatttcagcagccgttttttgcatttcagaatgaatattcagccgtttgttatgaaagcgctttaaaaatcgatttctcttttataatggacctaacaaagagaaagaggtgaagaaaatgagtgcgaaaaaagtgtacggatttctgacacaagcatttatttttgccgtagttatgctcatatctaatgggattgcagcgattgtccccattcctatacccgcttccgtagtaggtttggtgttattatttgtcctcttatgcctgaaagtgattaagcttgaacaagtagaaacgctgggaacatcattaacgtcactgatcggatttttatttgtcccgtcgggcatctccgtgatgaattcacttggcgtcatgcagcagtacggcgtgcagatcgcactcgtcatcttactcgccaccatcattctgttaggggcgacaggccttttttctcagctgatcttgtctgtcagccaaaaacgtcagaaggctgctccggctgataaacaaacggtgcgccgttccaatcaggaaaacgaacttgtgcagcattaggagggaaaacggatgagtccatatttcggtattgtcgtttcacttgcggcctttggcatcggcacgtatttatttaaaaaaacgagaggctttttcctcttcaccccgctgtttgttgcgatggtgcttggaattctttttctgaagctcggcggtttttcgtatgaagattataaaagcggaggagacattattaaattcttcctggagcccgcgacgatcgcttttgccatccctttatacaaacagcgtgccaagctgaaaaaatactggtggcagatcatgtcttccatcattgtcggctctatctgctcagtcacgattgtctatttgatcgcaaaaggcattcatctcgacgcggccgttatgaaaagcatgcttccgcaggcggcgacaacggcaattgcccttccgctgtcaaaagggatcggcggcatcaccgacatcaccgctttcgccgttattttcaacgccgttatcgtctatgctcttggcgctttattcttaaaactgtttaaagtaaagcacccaatctctaagggactggctctcggcacatcaggacacgcactcggtgttgcggtcggcattgagatgggggaagtagaagcggcaatggcaagtatcgcggttgtcgtcgtaggagtggtgacggtgctggtcattccggtattcgttcagctcatcggaggataaacccgggtcatagacccgggttttttattgtgttggcacgtccgcgggcggcaaagaacgaaatttcacatttttccttgcgctcaccccggcatcgtgttaaaatgaaaaagttgatccggagaagtcattcttgactaatgatccggtattgtgtagaatagttattgaattgaatataaatcacaagcagaggcacccgcttctcacctgattgacacattcatgtagttggcaggttgaccgtacatttttatttatgcagatgttcgtagtgtgggtgtgttgtcatgcccgcactttttgtttgcctgcagaatgcagtcaaaaagcgttgtgaatcaattcgaagaaactatggaggtggctcattattagcaaagatcaattggttaatgagggtatccgtgcacgtgaagttcgtctgatcggacaaaatggcgatcagctcggcatcaagtcccgtcaggaagcacttgaaatcgccggccgcgcaaatcttgaccttgtgttagttgcagcaaatgcaaaaccgcctgtctgccgcatcatggactacggtaagttccgattcgagcagcagaaaaaggacaaagaagcacgcaaaaatcaaaaaatcattaacttaaaagaagttagattaagtccgacgatcgatgagcatgactttaacacgaaattgcgcaatgcgattaaattccttgaaaaaggcgataaagtgaaagcttctatccgctttaaagggcgcgcaatcactcataaagaaatcggccagcgcgtattggaccgtttctctgaagcatgtgcggaagttgcgacagtcgaaacaaaaccaaaaatggacggccgcagcatgttcttaatgctcgcgccgaaaaacgaaaagcaataaggaggaaatcccatgccaaaaatgaaaactcaccgcggatctgctaaacgttttaaaaagacaggttctgggaagttaaaacgttctcatgcatacacaagtcacttattcgccaacaaatcccaaaagcaaaagcgtaagcttcgcaagggtgctattgtgagcgcaggagacttcaaacgcatcaaacaacagcttgccaacatcaagtaatcggacaaggaacaattaggagggaaatctaatgccaagagtaaaaggcggaactgttacacgtaagcgtcgtaaaaaggttcttaaattagcaaaaggttatttcggttcaaaacatacattatacaaagtagcaaaccagcaggtcatgaaatcaggaaactatgcattccgtgaccgccgtcagaaaaaacgtgatttccgtaagctttggatcactcgtatcaacgctgctgcacgtatgaacggtctttcttacagccgtttaatgcacggtcttaagctttcaggcatcgaagtaaaccgcaaaatgcttgctgatcttgctgtaaacgatcttactgctttcaatcagcttgctgatgctgctaaagctcagttagacaagtaagttgaaaaagccgctctctttccgggagcggtttttttacgtaaagggtgacaatcaatggctctcttcatttacgccgtattgataaacggatacggcttttggatcatgggcgctgataaaagaagagcaaaggcgcacaggtggagaatatcagagaaacgaatatggctcacagccgccatgttcggctcactcggcgtatggatcggcatgcgcaccttcaggcataagacgaagcacaaatcctttttatacggggtgccgctgctttttctcactgaagccgcccttgtgctcatgtatttgatgtataaaaaataaaaagcaggagagcttatcgctcgcctgcttttttcgcttttttgatgggctggtcccaatcaatcttgcaattcggataccgctccaatacctttttttcgacttcttcaaaatcatctgcagaaaagcggttcagcttttccggattttcggtccatacaaatattgtatggataaacagcggatgatctttggaagggatatgcttttctccttcaaagagcactcctttataagtaagctggagattttttcgcgtgtttttctgttcgtcaataaaataaaaattctcttttgattgcgccagtctgagccttcttttcgggtttgcgtaaaatttgacgcacatgtaaataaaataaataagaagtgcaagcaagacaatcctcaatactgtaatggccatatgtgtgaaggcacctcctcacctttgtcatgatctgatgtaatacgaaaaacaaaacaaaaagtttcatttttttaaaagaaatagataaaaacatttacccgtttttcaggcgaattaatcgtatgcttcagcattggttttgtataataagaagggtagtgaaaaaaaggaggtttattgatgacaaaattagatgaaacgctcaccatgctgaaagcgttaacggatgcaaaagggataccgggaaatgagagagaagtaagacaagtgatgaaatcatacatagaaccatttgccgatgatgtcacaacagaccggctgggaagtttaatcgccaaaaaaaccggcaaagaaaacggtccgaaaatcatgatctcagggcatttagacgaagtcggttttatggtgacgcaaatcactgataaaggctttctccgctttcaaaccgtcggcggctggtggtctcaggtcatgctggcccagcgcgtcaccgtcgtgacaaaaaaaggggacatcacggggatcatcggttcgaaaccgcctcacattctgcctcctgacgccagaaaaaaagccgctgatattaaagagatgttcatcgatatcggggcgtccagccgtgaagaagcaatggaatggggcgttcttccgggtgatcagattgtgccgtattttgaatttacagtgatgaacaatgaaaagcatttattggcgaaagcgtgggacaaccgtatcggctgtgcgattgccatcgatgtattaaaaaatctgaaaaacagtgatcacccgaatgaagtatacggggtcggaacggttcaagaagaagtcgggctgcgcggggcgaaaacagcggcacatacgatccagcctgatatcgcgttcggtgtggatgtcggaattgccggagatacaccgggaatttctgaaaaagaggcgcaaagcaaaatcggcgaagggccgcaaattattctgtatgacgcgtcaatggtatctcacaaagggctgcgcgaccttgtcgtaaacacggcggaagaagcgggaattccgtatcaattcgattccattgccggagggggcacggattcaggttctattcatttaaccgcaaacggagtgccggcgctgtccattacgatcgcgacgcgctacattcacactcatgccgctattttgcatcgggatgattatgagaatacggtaaaattgatcacagaagtaattaaaaaattagaccgggaaacggttgaccgtattacttatcaataaagatacggaagaatctgcttttttaagcagattctttttttttgtctgtacaaatatgagccttgcgtctacaataagaaaagacatagaaaaatctgacaacatgtttttgaaagcgctttaaaaaaagggaggtttacaaatgaaaaacagattcagacgcatgatccgcttttcatgcgcagtcgttacagccggtctgcttctgatgtcttcatctccggcatctgccgcgttttggggggcatcaaatgaattgcttcacgatccgacaatggcgaaggaaggaaacacgtggtacgctttcggaaccggtttggaaggggagagggggcttcgcgtcttaaaggcgggcagcggcggcgtatggaccgttcagaaatcaatctttacttccccgctgtcatggtggggcaattatgtgccgaattacgggctgaatcaatgggcccccgatgttcaatattttaacggaaagtattggctgtattatgccgtttcttcattcggcaaaaatacctccgcgatcggtcttgcatcatctacaagcctcagttcgggaaactggaaggacgaagggcttgtcatccgttcgacaagcgccaataactacaatgcaattgatccggagctgacaattgataaagacggaaacccttggcttgccttcggttctttttggagcggcattaagctgacaaagcttgataaaaatacaatgaaaccgacgggatcactttattccatcgctgccagaccgaataacggcggagctttggaagcgccggccatcacctaccagaacggctactattacttaatggtgtcgtttgataaatgctgttcaggggtgaatagtacgtacaaaatcgcttatggaagatccaaaagcatcaccggcccatatctcgataaaagcgggaaaagcatgtctgaaggcggagggacgattcttgattccggcaatgaccgctggaaaggcccgggcggtcaagacattgtgaacgggaatattttagtgcgtcatgcgtatgatgccgaaaacagcggaattccgaagatgctcatcaatgatatcgattggagttcaggctggccttcctattaattgatcagccgggcatgtgtgtccggcttttttacttgcaataaaagattgacagtttgattcctccttaactataataaagttgttcgtacaaataaaagaataaaagttttattatttatattcgtacgtatatttatttaaaaatgcaagcgctttattttgatgggaaggggaaatgaatgtgcttcagaacaaagaatatgaattttggtttgtaacgggaagccagcacttatacggagaggaaacgctgcagcttgtcgataaacacgcaaagggaatatgtgacggtctcagcggggtgtcatcaagatacaagatcaggcataaaccggttgtcacgtcatctgaaacgatcagagaggttttgcgggaagcgcagtatcaagaaaactgtgccggggtcgtgacgtggatgcatacattttcccctgcgaaaatgtggattgaaggtctttccgcttttcaaaagccgatgcttcatctgcatacccagtatcatcgcgacatcccgtgggaaacgattgatatggactttatgaacagcaaccaatccgctcacggagaccgggagtacggatatatccagtcaagaatggggcagacgagaaaagtcatcgcaggctattgggatgatgaggaagtcaaacatgacatttcgcaatggatgaacacggctgccgcttggaatgaaagcaggaatattaaagtagcccggttcggcgacaatatgcggaatgtggcggttactgacggagacaaagtcggcgcccacattcaattcggctggcaggttgacgggtacggaatcggcgatcttaccgaggtgatgaacaatgtcaccgacgcagaaattgaggcgctttatgaggaatacgacaaattgtatgtcatcagcgacgaaacgaagcgggatgaagcaaaagttgcttccattaaagaacaggcgaaaattgaactcggattaacggcctttctcgaacggggcggatatacagcgttttcgacctcctttgaagttttgcacggaatgaagcagcttccgggtcttgccgttcagcgtctcatggaaaaagggtacggatttgccggcgaaggcgattggaaaacggctgcccttgtgcgaatgatgaaaataatggcggacggagaacaaacctccttcatggaagattatacgtaccattttgaaccgggtcgtgcgatgattctcggatcacatatgcttgaagtatgtccgacgatcgcccttgatcagccgaaaatcgaagtccatccgctctcaatcggagggaaggaagatccggcccggctggtttttaacggaatcggcggttcagccatcatcgccagcatcattgatatcggcgggcggttccgtctcattctgaatgaagcggaaggcagggaaattgatcatgatatgccgaatctccctgtggcgcgggtgctgtggaagccggagccatcgctgaaaacagctgcggaagcatggattctggcgggaggcgcccaccatacctgtatgtccttccggcttacggctgaacagatgcttgactgggctgagatggcaggcattgaaagcatctttatttcccgcaatactgaaatacatgagctgaaaaaagagctgaaatggaatgacgtattataccggctgggagggaattgatatggcgtatacgattggtgttgatttcggcacattgtccggccgggcggtgcttgtcaatgtccgcacgggcgaagaaatcgcgtctgcggtaaaagaatacactcatgccgtcatcgaccgcacgctgccgaagacgggtgaaaaactccctcgggactgggcgcttcagcatcctgccgattatatcgaagttctggaaacggcgattccgaacctgcttgagcaggcgggcgctgatccaaaagacgtgatcggcataggaattgatttcaccgcctgcacgattttaccgatagacggcgcggggcagccgctttgtatgctgccggaatttgaacgggagccccacagttatgtgaagctgtggaagcatcatgcggctcaaaaacatgcagaccgtttgaacacgattgccgaagacacaaaagaaacattccttaaaagatacggcggtaaaatttcttctgaatggatgatcccgaaaatcatgcaaatcgcggaagaagcgccgcatatatacaaggcggcagatcggattgtggaagcggcagactggatcgtctatcaattgtgcggttcattgaagcgaagcaactgcacggccggctacaaagcaatctggaatgaggagacggggtatccgccggatcattttttcgaaaagctcaacccgttaatgaaaacgattacacaggataaattaagcggcgcgatttattcagtcggggaaaaagcaggaggtttgaccgaaaaaatggcggagctgaccgggcttctgccggggacggccgttgccgtcgccaatgtcgacgctcatgtgtcagtgcccgcggtcggtattacagagccggggaaaatgctgatgatcatgggaacgtctacctgccatgtgctgctcggcgaggaagaacatatcgtccccggtatgtgcggggtcgtcaataacggcattttgcccggatatgcgggatatgaagcggggcagtcctgtgtcggcgaccactttgaatggttcgtcaaaacgtgcgttccgagagactatgagaaggaagctgaggataaacacatagacattcacgagctgctcagcaaaaaagcagcagaacttgttcccggggaaagcggccttctcgcgcttgactggtggaacggaaaccggtcaaccttggtggacgccgatttgacgggcatgatgctcggcatgacgctgcacacgaagcccgaagaaatctacagggcattgattgaagcgacggcgttcggaacgaggatgattatcgaaacgttccgggaaaacggcgttccggtcgaggagctttacgcagccggaggaatcgccgaaaaaaatccgtttgtcatgcagatttacgcagacgtcacaaatatggacattcaattatccggatctccgcaggcgcctgcactgggctccgcgattttcggagcgctcgccgcgggacgggaaaacggaggattctccaatattgctgaagcttgcgcgcatatggggaaattaaaagacggcttttatgccccgaaccgggaaagagctgagatttatgacagcttatatgcggaatataaagagctcgtacactacttcggcaaagaaaacaatgtcatgaaacgcctgaaagccattaaaaaccgtgattttgcgaaaggggggagccgccatgcttgaagcgttaaaagaagaagtgctcgccgccaatctgaagcttgaggaacataaccttgtcacgtttacatgggggaatgtcagcggcattgacagagagagcgggagaatcgtcattaaaccgagcggtgtcgattacagtgagctgaccgctgacaagctggtcgtcctgaatgaggacggagacattttggaaggctcgctgaaaccgtcttctgacacgccgacccatctttatctgtataaagcgtttccggctatcggcggaatcgttcatactcactcccgctgggcgacgagctgggcgcagtccggaagagacatacccgctctcggaacgactcacgcggattactttgaaagcgctataccctgcacgagggaaatgtatgaagaagaaattgtgaaagattacgagtatcatacaggcaaagttatagccgaaacctttcaaaacgaaccgtatgaacaaaatccgggtgtcctcgtccacagccacggcccgttctgctggggaacggacgcgctgaatgccctgcataacgccgttgtgctcgaaacggtagcggaaatggcctaccattcgcttatgctgaacaaacagctcagtccgatcgacagagtgctgcatgataagcatttttacagaaaacacggggcgaatgcttattatggccaaacttgacgcagccgggtttctgattgatttagacggaaccgtattcagggggcgggagctgattgacggcgcaaaagaagccgttcatacccttcagtcactgggcaaagccgttgtctttttaagcaaccgcggcaatctatcaaaagcaatgtgcagaaagaaactgctgggtgccggtatccgcacggatgaacggagcatcgtgctgtcctccagtgtgacggcatcatttttaaagaagcattatcctttgtcaaaggtctgggtgttaggagagaaagggctgactgatgaactcgctttagcgggtgtcgtcctggcgcaaaacccgcaggcggcagactggcttgtcatctccctgcatgaaaccgtcacctataaggatctgaatctcgcttttaaggcggcttcctccggcgcgcgcatcatcgccacgaacaaagaccgctcctttccgaatgaaggcggtcatgccatggatgtcgcgggaatgatcggggccattgaagcatccgccggagcaaaaacggagcttgtcatcggcaaaccgtcttggctgatggctgaggcggcatgtgaagcgctcggacttccccctgaggaatgcgccataatcggagacagcctcgaatctgatatcgcaatgggcaggctgtacggaatgaaaagcatattggttctgacggggtcggccaaacttggggagccccgtctatatgaacctgacatcgtccttgattctattaaagacctgacagaattagcgaaggagggaatccttttatgaaacgttctcctgaggacattcaatccgagtttgacaaggaaggggccagccgctcaccgattcaaatagaagatatcgtgatcggggcgaatgcaaaagaagagcttctcagatttctgcaaaaaaaatgctggaatcatccggtcatcgtctgtgaccggaacacgtacgaggcggcgggacgtctgcttgcggacgaattaagggcaggcggaatcaaagcgtcaaaagtcatcattccggagcatgaagccggggccgccgcggctgatgagaggacattggtctatacgctgatcaatctcgcggaagagacggatgttatcatagcggccggttcaggaacgattcacgacattacgcggtttgccgcttatcagcgcggattgccgtttatctcattccccaccgctccgtcagtcgacggttttacatcggcgggagcgccgctcatattaaacggaatcaaaacgacgattcaaacgaaagcgcccatcgccttatttgccgatacgaatgtattaaaagaagcgccccgttcaatgacagccgcgggcttcggagacatgctcgggaaaataacatcgctggctgattgggagatttcccgcaggcttgcgggtgagccgtactcagaagccggggcgaagcttgtgaaagacgcgctttggcagtgcattgatcaccgcgctgacattgccatgggaacggaggccggcattcagatactgatggaagcgctgatcgtttcgggtcttgtcatgcttgctcttgaccactcccgccccgcctcaggaggagagcatcacatctcgcattggattgagatggaaatgctgaaggcaaaacagcctccgattctccacggtgcgaaggtcggctgtgcgtgcgcggtgctgagtgatatttacaaagaactggcttgtcacgaaaagcttgctgaactgccgccgcactttcgcgaggcgattcagtccgcatatgaagggcttcccgacggcaaaacaattgccgggtggctctcatctgcgggaggtcccgcctgtttcgatgagatcggtgtaaaaaaggaccttgtcagcgatgcgcttaagcatgcgcacacactgcgagaccgttataccggtttaaccatcataaatgaaaatgcagcgctctttgcacatcatttgcatcaatagccgcacggcctaaagtggaaggggtaatgacatgaaaaaaacgaccgctgtatgtttggtgctgatgatgctcttcttgtttaccgccggctgttcacaagaacggactgccggccggccgggagaaacggagctgacgttttggacgtttaacggtctgcacgaacagttttatcaggaaatggtcaaagaatggaatcagaagtatccggatcgcaaaatcaagctgaataccgttgtttatccttatggacaaatgcatgataatttatcggtttcgctgatcgcgggtgaggggcttcccgatatagccgacgtggaattaagccggttctcgaactttctgaaggggaaggatatcccgcttgccgatctgacgccgctgattgaaaaagaccgcgataagtttgtggaagcgcgtctggccttatacagcaaaaacggaaaattgtacggccttgatacacatgtggggacgaccgtcatgttttacaacatggatatcatgaaaaaagcgggcgttgatcccgcctccattaagacatgggaagattaccggcgggcaggaaaaaaagtgcgtgaagccgctgggaaaccgatgggaacggttgaaacaaacgactccgccacattcctatccatgatttcgcagcaagggtcaggctactacagcaaaaacggaaaattgattctgaacagcaagacgaatacagatacactgaatgatgtaaaggacatggtaaatgataaaacccttctgccggctcccggcggcggccatcacagcgaagaatactacggttttatgaatcagggcggggcagcctcagtgctgatgcccatttggtacatgggacggtttatcgattatatgcctgatttaaaagggaaaatggcgatttaccctatgccggcctggaaagaaggcggtgacagatcagcgggtttaggcggaacagccaccgtcgtgccgaagcaggctgaacatctggagctcgcgaaagaatttctcggatttgcgaaaggttcaaaggaagggaacataaagctgtggacggtgctcggctttgacccgctccgctgggacgtgtgggattcaaaagaattgaaggagaaaaacaagtacacggatttcttccggaacggtacgtcaattttttcctcgctccttgaaataaaagatgagatcaatccgatttatctgcatgaagacttctctaaagcggctgatctcgttgtcagacaggtgctgttcgatgcgctgaagacgcaggaaaaaacacctgaggaagccttggacgaggcggcagagcaattagaaaaataggagaagccgccctatttaacagtgaaagcgggggagcttttatgagacctgtaaagacagagacagcgcaaaccgtttctgcagtccggaagaagccgcgccggcgcaatgtgctgtattcaaaaaaagcggcgccttatctttttacggcgccatttatcatttcgtttctcgttttctttttgtatccgatcatcagcgtgtttatcatgagctttcagcggatactgccgggagaaattacatttgtcgggttttccaattataccgctcttcttaatccaaccttttatacggcattatttaacacattggaatatactttctggacgctgatcgtgctgattccggtgccgcttcttttagcggtgattctgaattcgaagctcgtcaggttcagaaatgtgtttaaatcggctctgtttgtaccggctttaacatcgacgatcgtagcggggattattttccggctgatgttcggagaaatgaatacgtcgcttgcaaacgagctgatgatgaagcttggcgcatcaccccaaaactggctcaacaacaaaggtaccggcatgtttttaatggtgctgcttgcgtcatggaggtggatggggattaacattctttactttctggcgggtttgcaaaatgtgccgaaagaattgtatgaggcggctgaaattgacggggcgagtacgtggaaaaagttccggcatatcacccttccatttttaaagccggtgtccgtttatgtgttaacgatcagtatgatcggcggtttcagaatgtttgaggaaagctatgtgctttggcagaataattccccgggcaatatcggcctcacgcttgtcggttatttatatcagcaggggcttgcatacaacgaaatggggtacggggcagcaatc

SEQ ID NO: 7 - DNA, 1000000 bp, Bacillus amyloliquefaciens
ggaattgtccttttgcttgtcatcttactagtcagccttgtttcactgaaactgtccggttcgtttaaaggggagggataagcgttgcgtaacaatcacatgttttccgtgtacagagtcgcgtttaccttgttttttatcatgctgagcctgttgtatatctttccgatgatctgtctattgctcggttcattaaagccgtcatctgagctgatgcgcatcgggctgaatctgcgtcttgatccggatgtgatgagccttgataactacacctatttgttcaacggggggagcatttattttaaatggttttttaacagcctgctgctcggcgtcctcaccacggttctcacgctgtttttttcctctttgatcggctacggactcggtgtctacgagtttaaaggcagaaatattattttcgttcttgtgctgatcattatgatggtgcctcttgaagtgatgatgctcccgttgttcaaattgacggtgggtcttcatttaatcgattcttatacgggggtgattctgccgtttattgtgtcgcctgtcgccgtgttctttttccggcaatatgcgctcggacttccgaaggatcttcttgattcagcgagaatggacggctgcaccgaattcggcattttcttcagaattatggcgccgctcatgaaaccggcattcggagcaatgatcattcttcaatctttaaacagctggaataactttttatggccgctgatcgtgcttcggtcgaaagaaatgtttacgcttccaatcggactttcagggctgctgagtccgtacggcaacaactatgacatgctgatttccgggtccgtttttgcgatactgccggtgatcatcatattcttgttttttcaaaaatacttcatttccggcctcacagtaggcggagtgaagggatagagagagggaggaaatgtaatgaaaaaagcggggattacagcagataaagaatatatcatcggtgaagtggacaaacggatgtacggatcttttatagaacatatgggccgggcggtgtatgaaggcatttatgagcccggacacccgaaagccgacaaggacggtttcagaacagacgtgcaggagttaatcaaggaattgcaagtgccgttcatccgctatccgggagggaattttctctcaggctacaattgggaggacggcgtcgggccggtgaagaaccgcccgcggaggcttgatttggcatggcagacgacagaaacgaacgaagtggggacgaatgaatttttaacgtgggcgaaaaaagtgaacgccgaagtgaatatggcggtcaatctcgggacgagaggaatcgatgccgcccggaacctcgtcgaatactgcaaccatcctgaagggtcatactggagcgacttacgaaaatcgcacggatatgaaaaaccttacggcatcaaaacatggtgcttaggaaatgagatggacggcccttggcagatcggtcataaaacggcgcatgaatacggacggcttgccgctgaaacagcaaaggtgatgaaatggacggacccgacgatcgaattggtggcttgcggaagctcaaacagcggcatgccgtccttcatcgagtgggaggccgaggtgcttgagcatacgtacgagcatgtggattacatttcactgcatacgtattacggcaaccatgaaaatgatcttgagaactatttggcgaagtctatggatttagaccattttattaaatccgtcacagccgtatgtgattatatgaaagcgaaaaaacgcagcaaaaaaacgattcacctttctttagatgaatggaatgtgtggtatcactcaaatgaagcggataaaaaagtggagccatggattacggcccggccgattctcgaagacatctacaattttgaagatgcgctgttgatcggttcactgctgattacgatgctgcagcatgcggacagactgaagatcgcctgtctcgcccagcttgtcaacgtgattgcgcctatcatgactgaaaagggcggagaagcatggaggcagccgatcttttacccttacatgcacgcctcagtctacgggagagggacttcgatgaagctgctgatcacctccccgaaatacgactcggcggactttacggatgtgccgtatgttgatgccgcggccgtttaccatgaagaggatgaagcactgaccatttttgccgtcaacaaaagcaaggaaccgatggaaacggagatcaaactgagggggtttgaagattaccgcatcattgagcatatcgtgctggagcatcaggatatgaaagcaaccaatcaaaaaaacagaaaagaagtcattcctcactccaacggaacgtcttcggcaaacgctgaagggataacggcacattttactccgctgtcctggaatgtcatccgtttatcaggaaaataatgttccgaaaagccgggctgccgctgccggcttttttttacgcaaaaatcatctcctgttatctgataattatgataatatttagaaaaagagaaaaggggctgggattaaatgaatgcgattacaatcgtcatagcgtctatatgtattttggcgatcgcctatcggctttacggtacctttatgatggtcaaagtattaaaaatcaatgatcagacaccgactccggcccatgtgcttgaggatgggaaagattatgtgcccacgaataagtgggtgtcattcggccaccacttcgcggcaatcgccgctgccggcccgcttgtcggaccgattctggcagctcagtttggctatctgcccgggcttttatggctgttaatcggagcggtgatcgggggagccgtgcacgatattgtcgtattgtttgcatcaatgcggaaaaacgggaaaacgctttctgaagtcgccaaagaagagctcggcccggtggcgggcttttgcaccggtctttccatgctgtttatcattacgatcacgatggcgggtctgtccatggttgtgctgcacgcgcttgagaaaaacccgtggggaacgtttgcggtggggattacgattccgatcgcgatgggggtcggcctctactataaaaaaacgggcaatctcaaactcgcatcaactgtcgggtttcttttgttaatggccggtgttgtaatcgggccgcggctgcagacaacggctctcggggacatgctgacacttgatgcgaaaacgcttgcagtggcgcttcccgtctatgcgtttttcgccgcggcgcttccggtttggcttttgctggctccgcgtgactatttaagcagttttatgaaaatcggggtttttgccgctttgatcgcaggcgtctttttcgtcaatcccgccattaaattcccggccgtaacggagtttattcacggcggagggccggtgatcgcgggtcctgtctggccgtttatttcaataacgattgcctgcggcgccatttcgggctttcatgcatttgtcggttctggcacaacgccgaaaatgctggataaatggagtgatataaaaccggttgctttcggagcgatgcttgtggaatgtctcgtcggaattatggcgctcattgcagctgccgctcttgagcccgccgactattttgccattaacagcacgcctgaaatattccgcgccctcgggatgaatgtcgtccatctgcctgaattgagtaaagaaatcgggctcagtctggaaggaagaacgggcggagccgttacgcttgccgtcggaatgacgtatatctttacggagattccgtttttcagtcatttggcttcatacttttttcaattcgtcattatgtttgaagcggtgtttattttaacggcgattgatgcgggaacccgtgtcgcccggtacttgattcaagagtttttcggagaggtctataagccgctgaaaaaaacagactggctgccgggctcgattttctcaagcgcgctcgcctgcctgctgtggggctatcttctgtattcgggcgacatcagttccatttgggcgctgttcggcgtatccaatcagcttatggcatctgtcggcttaatcatcggtgcgaccgtcgtattaaaaatagcggataagcggcgctatatgctgacatgcctgattcctctcgcttatttgtacgtgaccgtcaactatgcgggttattggatggtgcggtatgtgtatttgaaccccgaagcggcgggatacaacgtgctgaatggcgttttatccattatcatgctgattctcgggcttgtgattatcattgcggctgtgaaaaaatgggcgaatgtatggcgtgatccgagtgccagactggaagcttcaatacccggataaatccgcggccgatccgaacattgtagcatcataaaggcagagagccgatcggtctctctgctttcggcttatgacaaatccgccgcttccaaaaggtaatccgccaaatgaaccgcgcggacacggcctgttaatccttcgcgtaaaatgccgagctgcatttgcagaaggcatccgggattggctgtcacgatgacggccgcctccgtttttccggcggctttcatcttgctgtctaatattttcatagacatttctgactctgttatattataaattcccgccgacccgcagcagctgtcggccttttccatttctctgtactcagcccctttaatgtttttcaaaagcgtgcgcggttcttctgacgtatgcatcacattgcggagatggcaggagtcctgatatgtgacgatatgaggagactgcgcccgcaggtttttttgatggaacttcagatcaaccagtacggatgaaaagtctttgagcttccggacgaattgttcggcacgttccgcccatccaggttcatctttcagtaaatgcggatattcctgaagaaaggcgccgcatccgccggcgtttgtaatgatataatcagcgtcaagcgcctcaaaagcggcgatattccgcttggccagttcttttcccatctctttttctccgctgtgcccgtgaagcgcgccgcagcacgcctggccgtccggaaccgcgatttcacacccggccgcctgtaaaagcgccgttgtcgcatgatttgttgctaaaaacatcgtatccattaagcagcccgagaaaaaagcggcccgtttttggacgggacccgcggcaggaagaaaacgcggcctttccttcatgtctttccgtttcggggcgggcgggagcacttgttccattgtgcgcagatgttcaggcaaaacgcgcagcataccggtttttctgatggcggtctgcagtcccgatctttggtatattccgagaagattcacggctgcctgcatgcggttttgatgagggaaaagcccggtgaaggcggctttccgcaagaggcgcacgccgggcttatgttttttattttgatgaatgatatccctcgcttcttcaagcagctgtccgtaattgacccctgccggacaaacgggctcgcatgcccggcatccgagacacagcgaaagtgagcgctcgacatcttcatccggttcgatcagtccgtctgtgacggctttcatcagggcgatccggccgcgcggcgaatgggattcttgaaatcctgattcgatataggtcggacaggaaggaaggcagaagccgcagcgcatacagttcagcaattcaccttcatccatgcggtttttgaattctgtttgaatgtgttgctgctctttagccgttgtcatttcatcatcaccacgcgtttccttgatgaattggcgaatatttttcccggattcagcagattttggggatcaagcgcttgtttgatcgctttcatggcggtaatgccttctgttttcagcttcatttctaaatacggcgcttttacgatgccgaccccgtgttcacccgttatcgtcccgcccagctcaatcgctttttcaaaaatggcggcaaaagctttttcgacacgttccatctcctctgtatttcggatatcggtggtgcacgtcggatggaggttgccgtctccggcatggccgaatgtgcagatggacaggccgtatgtttctgcaatctcgttaatggctttgaccatgccggcaatttgtgatctcggcacggtcgcgtcttccagaatcgtcgtcggtttcagccgggcaagggctgataatgcggaccgtctggcctctgtaagcgcgaatgcctcttcctcggtttcggccgtttggacggatacggctgctccgtttttacagatggcttcgattttttccatatctcgtctgaccgtttcgatgtcaccgtcctgttcgatcagcagcaccgcttttgcatcggtcggaagcccgatcttggcgtaatcttcaatgacctgcagtgtcggctgatccagaaattcgagtgtcgccggaatgattttttcagcgatgatggcagaaacagattccgcagccgcttcaatatgttcatagagtgcaagcagcgtttttttcgtttccggcttcggaaccagctttaaagtcgcttccgtcacaacgccgagcgtaccttctgatccgacgaaaagccgggtcagatcataaccggcgacatcctttgtcagcttccctcctgtgcggatgatatcgcctgaagccaagacggcttcaaggccgaggacataatcccgggtgacgccgtacttcaaaccgcgcagcccgccggaattttcattaatattcccgccgatcgtcgatattttcatgctgctcggatcaggcggataaaataaccctttcctttcaaccgcatgaatcatatcttgcgtgatcacgcccggctggacggttgccgtcaaattttcttcatcgatttcaagaatgcggttcatatgtttgaataaaagcacaagcccgccttcagacggacatgtgccgccgcataagtttgtgcctgaacccctcggcacgatcggaatgtcatgcctgctgcaaatcgttaatatacgggacacgtcatccgcgctgcggggagcgattaccgcatccggcatggcttgcagctgaggagccgcatcgtaagaatacacaagacggccagccgccgaatcatcataattctccttcccgaccgtccggatgaacgcttcttttgcctctcgtgaaatcatgttctccaacctccctgataagaaaagcgttttcatttaattgtaaagaaaaacgattcttcacactatggagaaacatatgaaaaatgatgatatgattacgtgctttttgtatgttgatctaaaaagcggagcgccaaataaaaagccgttatgtcttcggggcggtcaagcttcatatttgtcagtgattccagtttggaaagacggtagcgcaatgtattgatatgaatatgcatgtcgtctgcggtgcgctttaacgataattgccggtcgaaaaaggcgcgcagcgtatccagaagttcttcccggccgagtacatgctcgagaacccgccgtgaaaattccgacctcgtgccgggcgcgatatcggcaatacacatatccagttttaaatcttcttcaaagacggcctgcttgtcaccgattccggctgaaagtgctttatccgcctgttcgtatgattccgcgaggcgctctcccggaacgatccgtccgatgccggcggtgacaggctgcccaaaaacggcgccgatctttttgatgagctgtgttttggaagccgaatttgcttcatggttaatgagaatgcgttcatttccccagcggacaaacaggtcttcagggcattcgttctgccagagccgcccgagctcctccgctttatattgctcataacgtccttgaatgagtatgatccggcggtatgcgtgaaggtctgcgccgatgagctttgctttttctaaaaagcccggagaccattctttcagctgcagccaatcaaccataaaggattcaagcattctcgcacgccactgcgcttcttccatatggcgcgtttctttaataaacagctccgtcattttcctgagcaattctccgaaaggcaggatatcgtcagggtctcctgtcagaccgaacactccgattacctcatggcctgaaaaaacggggaggttcagtcctgcttttacgccctggaggcgtttttcatcttctttcgtaatgatgacattccgtttttcgcgggcgcagatcagtgcgccttcatgaaaccatccggcgcgcgcctcattggtgcccgcgatgatcatcccttttgtatcggcaataatcacttcgcggctgtacatatgtttgacttcggcaatcaatttctttgccagttccggctgtaactgcatggcgatccccctcgccattattatacaaaaaaaaccgggtgtgccatcacccggttcatgcttattgcgcaggttttaatccgccttcaagtgttttgagcatttcatttttttctgagtctgacgcatgctgccaaagaacttcgaataagacgccgaggcccggaagcattttttcttcaccgctttggatggcgtcaacgatagtatgctccagctgatcctggttattgccggttacattggcaataacggcgttgcgtaaattaagatccattacaaccgctcctttttcctgaatgtgatacgcatattcttaccgcgcacgcggtttattatgtgctgttcttgagatataataacaacatgcatgaaaaaaggagagcacagacataaagtgaaacgaatcgactctgcaaaaaaccaaaaagtgaaggactggaaaaaacttcacacaaaaaaagagagacttaaaacgaatacatttctgatagaaggagagcatctggcagaagaagcgctcaaatcaaagggaacggtaaaagaaattctcgtaaacgatgagagcgccattccggccgatctggatatgagcattccgtgctacgtgctgagcgaagacgcgttttcagccgtgacggaaacggaaacgccgcagcggatcgccgcggtctgccatatgccggataagcggcctgatcagctgaagcggctgcttctgattgatgccgtacaggacccggggaatttaggaacaatgatcagaacggcagatgcggcgggaatcgacgccgttgtccttggtgagggaacggcagacccgtacaacggaaaaacgctgcgttcagcgcaaggatctcattttcatattcccattttaaaacgtccgcttgatgagtttaccgccgagctgaaatcacaaggcgtcgcgatctacggcacggcgcttgaaaacggtgcggcttatcaaagcgtgaagcctgaagaatcgttcgcgttaatcgtcgggaacgagggggcgggagtggacgccggccttctgcaaaaaaccgatctcaatctgtacgttccgctgtacggacaggcggaatcgctgaatgtggcggtagcggccgccatcctcgtttatcatctcagaggataggttgcgaaaaaccttggatttcactataatagatagcaataatgtaaaaaccgtgacagaggacgtcaatttttgcacacgctgccttccagggagaaaatgccgctgactgagagcatttttatcgcagcacagaaattgattttcacctctcgagttgtcaccgggaccgcgccaaacgcgcgtaaaggtgaaccggaacgatcgtttccgttatgtcaatgaagctgtcggcagatgaagtctgccttaaaaagggtggtaccgcggccacaactcgtcccttctctcaaggggcgggtttttttgttttctgaaaaaggcatagaacggtttggtttacataaaaggaggatgcatgatggaagagaagcttaaacagctcgaactggaagctgcagaaaaagtagaagcggcgggttcattaaaagaagttaacgacattcgggtgcaatatctcggaaaaaaagggccgattacagaagttctccgcggcatgggcaaactgtccgccgaagagcgcccgaaaatgggagcgctcgccaatgaagtgagagagcgcattgcagcagccattacggcgaaaaatgaacagcttgaacaagaagagatgaataaaaaactcagcagccagacgattgacgtcacgttgccgggcagtcaggtaaacatcgggggacgccatccgctgacggtcgttattgaagaaattgaagatttatttatcggcatgggatataccgtcgaagaaggccctgaagtggaaacggattattacaactttgaggcgctgaacctgccgaaggaacatccggcccgcgacatgcaggacagcttttacattacagaagaaatgctgatgagaacgcagacgtcaccggtgcagacgcgaacgatggaaaagcataaaggaaaaggccccgtcaaaatcatttgtcccggtaaagtgtatcgccgcgacaacgatgacgcgacacattcccatcagttcatgcagatcgagggtctcgtcgtggaccgcaaaatcagcatgagcgacctgaaaggcacgcttgaattggtcgccaaaaaaatgttcggccaagaccgtgaaatcaggctccgtccgagctttttcccgttcacagagccttctgtcgaggtggatgtgacctgctttaagtgcggcggacaaggctgctccgtctgcaaaaaaacaggctggatcgaaattctcggcgccggcatggttcacccgaacgtgctgaagatggccggattcaatcctgaggaataccagggttttgctttcggaatgggtgtggaacgtatcgcgatgctgaaatacggcattgaagatatccgccatttctataccaatgatgtcagattcatttcgcagtttaaacaggcgtaagaggaggatacacatgtttgtttcatataaatggttagaagattacgttgacttgcagggaatcgacccggccgtgcttgcagaaaaaattacgagagccggtattgaagttgagggtatcgagtataaaggggagggcgtaaaaggcgttgtcatcggacacgtgcttgagcgtgaacagcatccgaatgccgacaaactcaacaaatgccttgttgatatcggtgcggaggaacccgtgcagattatctgcggcgccccgaatgttgataaaggacagaaggttgccgttgcaacggtcggagccgtgcttcccggcaatttcaaaattaaaaaagccaagctgcgcggcgaagcgtctcacggcatgatctgttcccttcaggagctcggcattgaaagcaagctcgtggcgaaagaatatgcggaaggcattttcgtttttccgaatgatgctgaaacgggagctgacgcaatggcggcccttcagcttgatgatgcgattttagaattcggcttaacgccgaaccgcgccgacgcgatgaacatgcttggcgtggcttatgaagtggcggctatcctcggcgcagaggtaaagcttccggaggcttcatatgaaaaagcggcagaaaaagcggcggatgctgtttccgtcaagattgaagatacgcaggccaatccgcattatgccgcaaaaatcattaaaaacgtcaaaatcggcccgtcaccgctttggatgcagacgaagctgatgaatgcaggcatccgcccgcataataacgtcgtggacattacaaacttcgtcctccttgagtacggacagccgcttcacgctttcgattacgaccggttcggttcaaaagaggtcgtcgtcagaaaagcggcggaaaacgaaaccatcgtgacgctggatgaacaagagcgcaagctgtcaagcagccatttggtcatcacaaacggaaaaaaagcgcaagccgttgcgggagtcatgggcggagccgagtctgaagtccgtgaagacaccactgcgattttactggaagccgcttatttcgacggacagaccgtccgcaaagcgtcgagagacctcggactgagaagcgaagcgagcgccagatatgaaaaaggcattgatccggcccgcgttttgctggcggctgaacgggcctgcagtctcattcaggcatatgccggcggagaagtgctctcaggcacggttgaagaaaaccatctgaaaatcgaagcaaacaacattcacgtgtctgttgaaaaagtgaacgccgtgcttggcatggcaatcgctaaagaagaaatcatcagcatttacaagcgcctcgggtttgcagtcagtgaagctgaagacgttctcgtcgtaacagtgccgtcccgccgcggagatattagaatagaagaagacctgattgaagaagcggcgagattgtacgggtatgacaatattccgtccacgcttccggaaacggccggcacgacaggcggcttgacaccgtatcaggcaaaacgccggaaagtgagacgtttccttgaaggagcgggtctttcacaagcgaccacttattcattaacgaatgataaaaaagcggccgcttttgcgatcgaaaaatcattcaacacgatgcttgctctgccgatgagcgaagaaagaagcattctcagacacagtctcgtgccgaatcttcttgaagccgtttcatacaatctggccagacagactgattccgttgctttatatgaaacgggttctgtatttctgacgaaagaagaaaacacaaaaccggttgaaaaagaacgggttgccggagctgtaaccggattgtggcgcaaaaatttatggcagggtgagaaaaagccggttgatttcttcgtcgccaaaggaatcgttgaaggcctgctgcatcaattgaatgtgtcagatcgggttgaatttgtccagtctgcacgcaaaaacatgcatcccggccggacggcaaacattctattgaacggttcgcttgccggatttatcggccaggtgcatccggcaatggaaaaagagctggatatcaaagaaacgtatgtgttcgagcttgatctgcacgcgcttctgaccgaggaaacagaacctgtcgtgtatacgccgattccgaagtacccgtccgtcacgcgcgacattgcgcttgtggcagataaaaccgttacaagcggacagctcgaagccgtgatcaaagaagccggcggcgcgctgctgaaagaagtcaccgtatttgatgtgtacgaaggtgagcatatggaagagggcaaaaaatccgtcgccttctcgctccaatatgttaaccctgaacaaacattgacagaagaagaagtgacaaaagtacatgaaaacgtgctgaaagcgctggaagaaacgtatcaggcggtattaagaggataaagaaaaagcttgcagatcattctgcaagctttttttattatgaccgtttccgttctacaaggcgtttcgctttttgcgtattggcaaaatgaagtttggtgaacgttctgagcgcaccttctcccttattgatgatcagcttggcggcagcttcatcgacgtgcggccccgcgccttttggaatcgtcatcccagcctcacgggaaagcttatccatttcaattaagaaagaatatcgcgcaatgatagaggctgcggcgacggaaagatgtatgctttccgctttcgtgctgaaaaacgttttttcttttacgatatcccgtccggaaagatgcttaaaataaatgccgggctctgcaaattggtcaatcagaatcgcttccggtttaacgccgttcatttttctcagcagattggaaatcgcctgattatgaaggagcgccttcatttttccttggctcatgcctttttcctgcatctgattgtatttttcgtttttcaacacaagcaggctgtaaggaatggttttaattaacagtttggcgatttcaataatctgcggatcttttaaatccttcgaatccttcacaccgagttctttcattaaagaaagctttgttttgtcggcgtaagcgcaggcaaccgttatcggcccgaagtaatcgcctgttccgacttcatcagagccgatcactgacatggaggcaatgcccgccgggggagcgtaaagcggatcggccgcttttttgacggttttctttgccttcggcgcctcagccgttccccagcgggccgcttctgtgccggcgttttttccctgaaagagaaccttgcccgagcggtaggctgtaatggtacagcccgggggcttggcctggaagacggcgccctgcggaacggcgggagtaagggagccggcataggattgtttcatttgttccatagcggaagcggatacttttataacagaatgggacacgatataatctccttttttggcacttttcactgtatataccagtgtatcataacagcccgaggcttgtctttccattcaaacgataatcgtggtatgataggaactaggattctcgcggaatggaggagaaacgttgtctgacggcaaaaaaaccaaaacgacagtaaacatttacggccagcacttcaccattatcggggaagaaagcaaagcgcacatgcgccatgtggccggaatggttgatgataaaatgagagaaatcaacgagaaaaatccatatcttgatataaataagctcgctgtattgactgcggtcaatgtcgtgcatgattatatgaaactgcaagaaaaatatgaaatactggagcggcagcttaaagaaaaggaatgaacaccatatgatagatatcatcatcttagttctgctcttaatgggcacattgcttggattaaaaagaggatttatcctccaatttatatacttgacgagtttcatcctctcgattgcgtttgcggcgcttttttacaaaaacctggccccgcatctgagctttatacccgcccctgatttttccggcgggcaggcggctctgtcttttattaaaggaaacgtggagacggcttattacaacgcgatcgcgtttgtcattttgtttatcatcgcaaagatcctgctccggattatcggagcggcgcttaatatcatcgccggcattccggtcattaaacagatcaacaaactgctgggcggggtgcttggatttctggaagtctatttatttgcgtttatcctgttatacgtcgcatccgtactgccggtaagcgtgcttcaggatatgctcgcacaatcgacgcttgcaaatatcatcacacatcatacgccgtatctgtcggggctcctgcaagaactgtgggcccagtacggggcataaaaaacttctcttgaccggagaagtttttttcaagctctgcgtcagttgtgccggaagagaaaaatttgtatgatgaaaagcaggaaacgactgggggttaacagtatgcataaaaaagatatcatcaggctgcttgaaacgattgcggtctatatggaactgaaaggggacaacccgtttaaaatatcagccttccgaaaagcggcggcggcgcttgagcaggatgaccgcagcctgtcggaaatcgacgacatgatgtctttatccggaatcggaaaaggcacctacggcgtcattcgtgaatatatgcaggaaggtgtgtccggcacgcttctccaattgcagaaagaagtcccggaaggcttggttcctcttttgaagcttccgggcctcggcggcaaaaaaatcgccaagctgtaccaggagcttggcgttcatgacgcggaatcgctgaaagaagcatgcgagcagcaaaaagtacaggggctcgccggtttcggcaaaaaaacggaggagaaaatccttcaggctctcggagaagccggaaaacagccggaacggtttccgatcggctatgcgctcagcattgcttcagtcattgaagaacatttggcccggctgacggatattcagaaatattcccgggccggcagtctcagaagagcgcgggaaaccgtaaaagatctggattacattatcgctacagatcgtccggaggctgtcagagaacagcttctttccctcccgaacgtaaaagacgtgatagcgggcggggatacaaaagtatcggttatcctgacctttgaatacgagacgagtgtggatttccggcttgtgacagaggaacagtttgccaccacactgcatcattttaccggttctaaagatcacaacattaaaatgcgtcagctggcgaaagagcgcggtgaacggatcagtgaatacggagtagaaaccatagaaacgggagacgtcaaaacattcccgagcgaagaagcgttttacgcccacttcggtctgccgtttattcctcctgagctcagagaaagcgggcaggaggtcgacacgtaccgggaagaaacggaccttgtggagcataaagcgataaaaggcgatctccacatgcactcagcctggagtgacggcgctttttccatcagagaaatggcagaagcgtgtatggcaaaaggctaccagtacatggcgatcaccgaccattcccaatatttaaaggtagccaacgggttaacggccgaacggctcagaaaacaggcggaagaaattgacgcgttaaacgctgaatttgaaaattttcatatttttaaaggcgtagaaatggacattctccccgacggttcgcttgattatgatgacagcgttctgtctgaaatggatcttgtcatcgcatctattcattcaagcttcagccagccggagcatgtcattatgaaacggcttgaacaggcgctgacgaataagcacgtggacattatcgcccacccgacgggacgcctgatcggcagacgggccggctatgaagtcgacatcgacatgctgattgagctcgcagccaaaacaaatacggcgcttgaactgaatgcaaaccccgcgcgcctcgatttacggactgagcatctgatcaaagcaaatgaaaaaggtgtgactttggtcattaataccgatgcccataatatcgagatgctcgatgatatgaaaacgggcgtgaccgctgcgcgcaaaggctggacagagacaaaacatgtgttaaacgcccggccgttacatgaggtcaaagcatttctgacgcgcaatgattaagtaaggaggaccataaaaccgtgcagcaaaaagtgttatcatcacttgaatttcataaagtaaaagaacagattaccgcacatgccgcctcatcgctcggcagggagaagcttctgcagctgaaacctttgacggatctcgccgacatccaaaaacagctggatgaagtcgaagaagcatccgcggtcatgcgcttgcgaggccatgctccgttcggcggcctgaccgacataagatccgctttacggcgggcggaaatcggcagtgtgctgacgccggcggaattcaccgaattgtccgggctgctgtatgccgttaaacaaatgaagcattttatcagccaaatgacagaagacggcgtcggcataccgctgatacaggcccatgcagaagagctgattacattaggcgatttggaaagggagattaactcctgcattgatgaccatggtgaagtgcttgatcatgcgtctcccgctttaaggggaatccgcacgcagctcaggacgcttgaatcaagagtcagagaccggcttgaatcgatgctgcgttcatcttccgcttctaaaatgctgtctgacaccatcgttacgattcggaatgaccgctttgtcatcccggtcaaacaggaatacagatcaagctacggcggaattgtccacgatacatcttcatccggtgctacactgtttattgaaccgcaggcgatcgtagatatgaacaactcgcttcagcaggcgaaagtaaaagaaaaacaggaaatcgaacggattctccggatgctgacggagcatacggctgaacacacacaagaaatcgctcaaaatgtggaagtgctgcagacactggatttcattttcgccaaggcgagatacgcaaaagcaatgaaggcgacaaaaccattcatgaacggagacggctttatccgtctgaaaaaagcgcgccatccgctgctgccccaagatcaagtcgtggccaacgatattgaactgggcggagattattcaacgatcgtcatcacgggaccgaatacgggcggtaaaaccgttacgttaaaaacactcgggctgctgacgataatggcgcaggcaggattgcacataccggctgacgagggctcggaagcagccgtatttgacaatgtgtttgccgatatcggcgatgaacagtcgatcgaacaaagtctgagtacgttctcatctcacatggtcaatatcgtcaatattttaaaagacgtgtctgaaaacagtcttgtgctgtttgacgaactcggtgccggaacagatccgcaggaaggggcggcgcttgccatgagcatccttgacgaagttcaccggacaaacgccagagtgcttgcgacaacccattatccggaactgaaagcatacggatataacagacaaggcgtcatgaatgccagcgttgaatttgacattgaaacgctttcgcctacctataaacttctgatcggagtgccgggccgaagcaacgcatttgaaatctcaagacgccttgggcttccggagcatatcatcggccaggcgaagtcagaaatgaccgccgaacataacgaagtcgatctgatgatcgcatcgcttgaaaaaagcaaaaaaagagcggatgaagaactttctgaaaccgaatcactcagaaaagaagcagaaaaactgcacaaagagcttcagcagcaaatcattgagctgaatgcccaaaaagataaaatgatggaagaagccgagcggaaagctgcggaaaaactggaagccgccgcaaatgaagccgaacagattatccgcgagctcaggtccatcaagcaagaacacagatcctttaaggaacacgagctgattgacgccaaaaaacgtctcggagacgcgatgccggcttttgaaaaatcaaagcagccggaaagaaaaacagagaaaaaacgcgagctgaagccgggcgacgaagtaaaggtgctcacattcggacaaaaaggggcgctgcttgaaaaaaccggcgagaaagaatggaacgtccaaatcggcatccttaaaatgaaggtgaaggaaaaagatcttgagtttctcaaatcggctcctgaaccgaaaaaagaaaaagcaatcaccgccgtaaaagggaaggattatcacgtatcccttgaacttgacctcaggggagagcgttacgaaaacgccctcagccgcgtcgaaaaatatttagatgacgcggtgctcgccggctatccgagagtgtccatcattcacggaaaaggcacgggcgccctccgaaaaggggtgcaggatcttctgaaaaaccaccgcagcgtgaaaagctcgcggttcggggaagcgggagaaggaggatcaggcgtaacgattgtcgaactaaaataaaaagggagaaaacgtcatgaatgctttttgggaaaatgagcttgttgaaatcgcggcttattacagtgttgccgtcttgtgtctcgtcatttttctgaccgtgtttgaattggtgacatcctataaaaactgggtggaaatccaaaaaggcaatcttgcggtggcaatggcgaccggagggaaaattctcggtatcgcaaatgtctttcagcacagcatcgcccagcataattcgcttttgcaaatgatcggctggggcgtatacggatttattatgcttttaatcagctattttatctttgaatttctgacgccccggtttaaaattgataaagaaattgaaaaagataacagagctgtcggctttatttcatttgtcatctcagtcggcctgtcatttgtggtggccgccgggatttaaggggacggggaaaaatggagaagcttgcgaaagtgctgctgtcggcagcggggatttttctgttcatcggacttatttatctggtcatgacatcttaatactgaaaaaaggctgccgaactcaaatcggcggccttttttattgagaataccagtttatgcaggccgtatcagagcaaatgacggcttcccaattcatggcgcggacgacagactgaatgtcttgttcttccatgagaaagagtgtcgtaaaagaatcatatatgctcataaaagcggcgcgccgttttttcatcggcaatgatcatgtcagcccgcagcagtccgcatacatccgaagccgccgtttgattgagtgaaaataggcctttctcttcgacaggctcataataagtgcagcgctttatgccttttgaacggaacacatccaaaagtcccggaatcaaaaatggcgaagtgacatcatcgctcggcaagtacagatcgggatgatggagccgatttaaccgctcggcggattcaggatgtgcatattcctcccgcaatgccgtgacagcagtcataagcgcaagcgccgtttctttttcagaacgcaggccgcaaatgctcatgacggtttgccaggaaacgggtctgcccatcgcgatgatctcctcatcactcggatacatatgttcataaggccgtttgcgcttttgctcttcccgaccatctggcatccggacaaagggatggagcaaaaaggcggccgacgtaatcggcttcggcagctggcgcaggataggaactcccccttcaaaatgcagcgtttccagaaaactcaacacctcctgaaactcgaaatttcccatgaaacgctttcccattccaatcacccttctgctataataatagcgtataggaaaacagaagggagaggtattatgcagtctgaaaagccatggctttctcaatatcccgaagagattccgcatgagcttgaatttaccgatcaaaccctgccatccaatctgacaaactccgcagctcaattcccgaaccataccgccatttattttctaggaaaaaaactcacattccaagacgttctcacagattcattaaagcttgccgcttttttacgcaaaacaggcctgaaaaaaggtgacagagccgccattatgctgcccaattgtccgcagtcggtcatcgctttttacggcgtattgtttgccggcggcattgtcgttcagaccaatcctctctacacggaacacgagcttgagtatcagctgaaagacagtgcgccgcgcgtgatcatcaccctcgatatgctgtttccgaaagtgataaaaatgaaaacgttatcactcgtcgaacgcattattacaacaagtataaaagactttttgccgtttccgaaaaatatgctttatacgctcacgcaaaagcaacaggtgcatattgattatgacggctgcgaacaaattcacaaattagcggatattttaaaaaacgaaaaagcagaggaagcagagccatttgatattgaccctgcgcatgacatcgccgtgcttcaatacacgggcggaacaaccggctatccgaaaggcgtcatgctcacacaccgaaacattcaggccaatacagaaatgtgcgccgcctggatgtacaaaatgaaaaagggagccgaaaaggtgctcggcatcgtgcctttttttcatgtgtacggattgaccgccgtgctcaatttttccattatgcagggatgtgaaatgatccttcttcctaaattcaatcctttggatacactgaaaacaatcgacaggttgaagccgacggttttccccggggcgccgacgatttacatcgggctgctgcatcacccggagctgaataagtatgatctgtcctccattgaaagctgtccgagcggttcagcggcactgccggttgaggtcaaacagaaatttgaaaaagtgaccggaggaaagcttgtggaaggctacggattatccgaagcatcaccggttacccattcaaacttcatctggggaaaaaataaacccggcagcatcggctgtccctggcccaataccgatgcgggaatctattcagaagaaaaaggcgggcttgcggagccgtatgaacacggcgagctgatcgtaaaaggccctcaggtcatgaaaggctattggaataagcaggaggagacggcgcgtgtcatcagagacggctggctgtttaccggagatatgggatatatggatgaggaaggatttttctacatcgccgacaggaaaaaagacatcatcattgccggcggatacaacatttacccccgcgaggtggaggaggcgctttatgagcatgaagccgttcaggaaatcgtggtagcgggcgtccctgattcctacagaggggaaacggtgaaagcatttatcgttttgaaaaaaggcgccgaggcagatgccgatgagcttgatgcgtttgcaagagagcggcttgcgccgtacaaagtcccgaagctgtacgaattcagaaaagagcttccgaaaacggccgtcggaaaaatattaagaaggcgtttagtcgaagaggaagatgcttcccatgaaaacaaggtgccttaaaagaaaaacttgacaaaatccggattcctttttatcatgaagttatgaatgaatagtcattcatttatcgaaggaaggaacgatgacattgaaccaaaaacggccaaagtatatgcagattattgatgcagcagtagaagtcatagcggaaaacggctatcaccaatcacaggtgtccaaaatcgccaagcaggccggcgttgcggacggcaccatctatttatatttcaaaaacaaagaggatatactcatttctctttttaaagaaaagatgggccagttcattgaacgcatggaagaagaagtgaaagaaaaaacgacggcaaaagaaaaactcgctctcgttattaagcagcatttcacactgctcggcaatgaccgccacctcgcgattgtgacccagcttgagctcagacagtcgaatatcaagctgcgtctgaaaatcaatgatattttaaaaggttatttaaacatgctggacaccattttgaccgaaggaatcgagtcgggcgaatggaaagataatctcgacgtccgcctcgcccggcagatgatattcgggacgatagatgaaacagtgacaacatgggtgatgaacgatcagaaatatgatcttccggatttgtcagacaaggtattggagctgttggtgtcagggattcatcaaaactaaagggggttgacggatgaacagcctttcgatggcggtagaacaatctgttgcggtgatcaccattaatcatcagccggcaaacgcgctgtccggcgcggttttagatgagttgtccggtctgttcgaccgctgtgaaacagatgacagtgtcagaagcatcatcattcgcggagaggggaaatttttctcggcgggcgctgatataaaggaatttacgtcgcttgaaaatcttgagcaatcttctgccatggcggataaaggccagcagctgatggaaagaattgaagggtttccgaagcccgttatcgcagcgattcacggcgctgcgctcggcggcggccttgagcttgccatggcctgccatatcagaatcgctacattagatgcaaagctcggcctgcccgagctgaatctcggcattattccgggctttgccgggacgcagcggcttccccggtacgtcggtacggcgaaagcgcttgaaatgatcggcacttcagaacctgtaaccggagaagaagcgctcagcctcggtcttgtcacgataggcgccgaacatgaggaagagctgctgcaaaaagcgaaaacgctcgcgggcaagtttgcggaaaaaagcccgcagtcgatggcttttctgcttgagctcctttattcaaacaaggtctattcttatgacggcggcttaaagcttgaagcaaagcgctttggggaagcatttgcatcagatgacgcaaaagaaggcattcaggcatttctcgaaaaaagaaagcctcaattcggtgggcgaagataaaggggataagaatatgaatctatttgtactgatgaaacggacgtttgacacagaagagaaaatcgtcattgaagcaggaaagattcaggaggacggggccgaatttatcattaatccgtatgatgaatacgccattgaagaagccattcagctgaaggaagagcacggcggaaccgtgaccgccgtaaccgtcggcggagaagatgcggagaaagaactgagaaccgcccttgcgatgggctgtgaccaggcggtgttaatcaatattgaagatgatctgagcgatcctgaccaatactccgtttcaactatcttatatcattatttcaaggaccgggaatatgatctgattctcggcggaaatgtcgcgattgacggcggttccggccaagtggctccaaggcttgccgaactgctgaacattccttgcgtcacaacgattacaaaactgacaatcagcggcgatgaagctgcggcagagaaagacaacgaaggggataccgaaatcattaaaacctcacttcctttagtcatcacggcacagcaaggcttaaacgagccgcgctatccgtcgcttccgggcattatgaaggcgaagaaaaaaccgctggaagaacttgagctcgatgatctcggcattgatgaagatgatgccgcaccgaagctcaaaacgatcgaacgttttctgccgccgcaaaaagaagcgggcagactgatcgaaggagaagcctctgagcaggcgaaggagcttgtatcactgctgagaaaagaagccaaagtcgtataaactgatattaaagaaactgggggatgtcagaatgggaaaaaaagtgatcgtactcggagaaattcgtgacggcgccttacggaacgtcacctttgaagccatagccgcaggcaaaaccatttccggcggaggagatgtcatcggcgtgctgatgggaaagggcgcggctgatgcagcatcagaactcattcagtacggcgccgacaaagtatttacggccgattcgccggggctttctcagtatacggcggacggatatgccgcaattctcggggatttgatcgaaaatgaaaagcctgatgcggtcattttcggccacacttctatgggaaaagatttgtcacctaagcttgcggcccggtttgaaacggggctgatttcagacagcacagatgtaagcgttaccggagataacatcgtttttacaagaccgatctattccggcaaagcctttgaacaggtgatttcaaccgatcctttcattctggcgacaattcgtccgaataatattcaggcattagaaaaagacgcgaaccggacgggtgatattgaagagcttgcggcgcctccggcagatttgcggacggtcattgaagaagtagtcaaaaaaacggcggacggcgtggatttatcagaagcgaaaattatcgtagcaggcggccgcggtgtaaaaagcaaagatggatttgaaccgttaaaagaacttgccgaggtgctcggagcagcggtgggcgcttcgcgcggcgcatgtgacgcggactactgcgactattctcttcaaatcggccagacgggaaaagtcgtcacgccggatttgtatatcgcctgcggaatttccggagcgattcagcatttggcgggcatgtcaaacagtaaggtcatcgttgccattaacaaagacccggaagcggaaatatttaaaatagcggactacggaattgtcggcgatttgttcgaagtggttccgcttctgactcaggaatttaaaaatgccaatattcattcataatcaaaaccctctggcttatttgtcagagggttttggtttgtgttaattagttcgtacaaattatagattaataaaacaacagattgacatgtacgaaccaatgtaataagcttttgtaaagcgcttacaaacttatccatacagcatacatcccagatagatcggctgtagtgctttcattcttattaaggggaaggaatgatcaagtttgtctcacaatacggcagtcattcaaactgatatcacacggggaaccattaataaaaacatatacggacatttcgcggaacacctgggaagaggcatatatgagggcatctgggtcggaaaagattccgatattccgaataccggaggggtcaggacggatgtcgccgccgccctcaagcagcttcagattcccgtcctcagatggccgggcggctgttttgctgatgaataccattgggcaaacggcgtagggaaacgcaaaacaatgctgaatacccattggggcgggacgattgattctaatgaattcggcacgcacgagtttatgatgctttgtgaactgctcggatgcgaaccgtacatcgccggtaacgtcggcagcggaacggttaaagaaatggctgattggattgaatacatgacgtttgaagcgggcacgccgatgtccgactggagaaaagaaaacgggcgggaaaaaccgtggaagctgaaatatttcggaataggaaatgagaactggggctgcggcggaaacatgcatcctgagtattatgctggcctttacagaaacttccaaacctatgtccgtaattacagcggtaatgaaatctataaaattgccggcggcgcgaatgtcgacgattaccgctggactgaaactttaatgaaaaaagccgcggatctcatagacggactgagcctgcattattacacaataccgggcgacttctggaaggggaaaggatcagcgacggagtttacggaagatgaatggttcatcacgatgaaaaaagcggcgcatatggatgaattgatcacaaggcacagcgccatcatggatcagtacgatcccgaaaaaagagtcgggctgatcattgatgaatggggcacgtggcttgatcctgagccgggcacaaatccgggctttctgtatcagcagaatacgatccgcgacgcccttgtcgccgccgcgcattttcacatttttcatcagcacgcagaccgcgtacagatggccaatatcgcgcaaaccgtcaacgtgcttcaggcaatgatcctgacagaagggaaagaaatgctgttgacgccgacgtatcatgtgttcgatatgtttaaggtgcaccaggacgcatctcttttggcggcagaaacaaatgcagccgggtacgaatggaatgacggccggctcccgcaagtcagcatttcagcgtccaaacagcagaacggagacatacatatcagcatttgcaatatcgatcatctgcacaaagctgacgtgaagattgaactgcggggcatgaaaaagacagggacgccttcgggaacgattctgcacgcggaaaaaatgaatgcccacaatacattcagcagtccggaaaacgtcaaaccgaagccgttttccgggtttgctcaaaagggaggaaaacttgaggcggagcttcctccgatggcgattgtattaatcacgctgcctgcaggtccatcttaagttttgaacgcccgccgcccggttataatacactgtataaataagattatttccggcgggttcgggggaaaataatataagcattaaattagcatgaacgaatgggagatgctatactaaaaatcatcatttgacaattggaggaataacaaatggctatcgtaaaagcaactgatcaatcgttctcagctgaaacaagtgaaggtgtcgtattggctgatttctgggctccttggtgcggaccttgtaaaatgatcgcgcccgttcttgaagagcttgatcaagaaatgggagacaaactgaaaatcgtcaaaatcgacgtggatgaaaaccaagaaactgccggtaaatacggcgtcatgagcatcccgacacttctcgtgctaaaagacggagaagtcgttgaaacatctgtcggcttcaaaccgaaagaagctcttgaagagcttgtaaacaaacatctgtaagccgaaagcttccgttacggcagggcgattcctttgaaaggggtcgcctttttttgatcttccaaaagctgagaatggagaaaaacaaatgttcgtgatacactgaatggacacgagaaatgaatgtaaggaagggtaacgtatggataaacaactgaaagaaaagctggccctccttcccgatcagccgggctgttatttaatgaaagaccgtcagaaaacagtcatctacgtggggaaagcgaaagtcttgaaaaacagggtgcggtcttatttcaccggttctcacgacgcgaaaacccaacggctggtgacggagattgaggactttgaatatatcgtgacttcctccaatcttgaagcgcttattttggaaatgaatctgattaaaaaatacgatccgaaatacaatgtcatgctgaaagatgataaaacctatccctttattaaaatcacccatgaacgtcatcctcggctgattgtcacccggaatgtcaaaaaagacaagggacgctatttcggcccgtatccgaatgtgcaggcggcgcgggaaacgaaaaaactgctggaccgcctttacccgctcaggaaatgctcaaagcttccggaccgcgtctgtctttattatcatctcggccaatgcctcgccccatgtgtaaaggatatatctgaggagacaaaccgcgagattgttgaagacatcacccgttttttaaagggagggcataacgaaatcaaaaaagagcttgaagcgaaaatggcagaagcggccgaaaagcttgaatttgaacgggctaaagaattccgcgaccagcttgctcacatcgaatcgacgatggagaagcagaaaatgaccatgaatgaccttctggaccgcgatgtgtttgcatatgcctacgataaaggctggatgtgcgttcaagtcttttttatacgccaaggaaaactgatcgaacgcgatgtcagcatgtttccgatgtatcaggaagcggatgaagagtttctgaccttcatcggccagttctattccaaaaacaatcactttctgcctaaggaaattctggtgcctgacagcgttgacagggacatgattggcgagctgttggaaaccgccgtgcatcagccgaaaaaaggtccgaaaaaagagctgcttttgcttgcgcacaaaaatgcgaaaatcgccctgcgggaaaaattctcgttaatcgagcgggatgaggaacggtcaatcggtgcagccgaacggctcggcgaagcactgaatatttacacgccgcatcggattgaagcgtttgacaactccaatattcaaggcacaaaccccgtatcggccatgattgtctttattgacggaaaaccgaataaaaaggaatatcgcaaatataaaattaaaaccgtaacagggccggacgattacggctcaatgagggaagtcgtcagaagaagatacacgagggtgctccgcgaaaatcttccgctgccggatttaatcatcattgacggcggaaaagggcagattaacgcggcgcgcgacgtgctcgagaatgagctcggccttgatgtcccggtagcgggactggcgaaagatgataaacaccggacatcgaaccttttgatcggcgacccgcttgaaccggtgtttctggagcggaacagccaagagttttacctgcttcagcgcattcaggacgaagttcaccgttttgcgatcagctttcacagacagatccggggaaaaagcgtctttcaatccgttctggatgatatccccggaatcggcgaaaaacgcaaaaaaatgctcttaaaacatttcggatctgtcaaaaagatgaaggaagcaagccttgacgatatcaaaaaagccggtgtgccggccgcggcggcccagttgctgtttgaaaaattaaaaaaatagtattgtgcttttctgaaaaatctgctagaatgtgaactaatttcataagatcgtgttatatggtgaagatagaggtgcgaacttcaatagtaagcctttggagaatgatggattctgcgaaaaaggctgaaaggggagcgtcgccgaagtgtgtcacatcccatcggtgtgatttgctggccttgcattaaataaatgtaaggctgtcaagaattcattttcttggagggctatctcgttgttcataatcaatcgtactgatatgaaaagcaatgagagctattcctctcattgctttttttattgtggacaaaacgctcttttctcctcacccgcacgaaccaaaatgtaaagggtggtctagtatgggtcttatcgtacaaaaattcggaggcacttccgtcggctctgccgaaaaaattcaaaatgccgcaaatcgcgccattgctgaaaagcaaaaaggccatgatgtcgtagtcgtcgtttcggcaatgggaaaatcaaccgacgcgctcgttaacctcgcggctgaaatcacatctgaaccaagcagacgcgagatggatatgcttttgtctacgggggagcaggtcacgatttcgcttttggccatggcgcttcaggaaaaaggatatgacgccgtctcttatacgggctggcaggcgggtgtccgcacggaagccgttcacggcaatgcgagaattacggatattgatatcacggcgattcgttcgcagcttgcagaaggcaaaattacagtcgttgccggttttcagggcgtaacggaagacggcggcatcacgacgctcggacggggcggttctgataccacggcggtcgctcttgcagcagcgctggaagcggataaatgcgacatttatacagatgttccgggcgtatttacgacagatccgcggtatgtccggtcagcgagaaaactggcggggatttcttatgatgaaatgctggaacttgcaaatctcggagcgggtgttcttcacccgcgggcggttgagttcgcgaaaaactaccaagtgcctttagaagtgcggtcaagcacggaacatgaagccggaacattaattgaggaggaatcatcaatggagcagaatttaatcgtcagaggaattgcatttgaagaccagatcacaagggtgtccgtcacgggccttgcaagcggactgacaacactttcaacaatcttcaccgcgctggcaaaacgaaacatcaacgttgacatcattattcagacacagtcggatgatggggaagcggatatttctttctcagtgaaaacggaagatgccgcccaaacggtcgccgtgcttgaagaatataaaaacgcgcttaactatgaaaaaattgaaaccgaaagaaaactggcgaaagtctccattgtcgggtcgggcatggtttcaaatcccggcgtcgccgcggacatgtttgccgtactggcggaaaaaaatgtacaagtcaaaatggtaagcacatccgaaataaaagtatcagcggttgtcagcgaaaatgatatggtgaaagcggtcgaagcgcttcatgatgcgtttgagctgtctaaacagccgtctgccgtataaacgggcaggcaaaaaggcgggacttttgagtcaccgcctttttcaattatacagggtccttcatatcccattttacagtcaggacgactttatccgctctcttttttacctgttcataagattctgcaatctgatcgttcatcaattgaatctgttcggctataaaaccggcttcaagctggaaacaaggctctttctgatgtttgagcctgctggatacgagcggtccttccagttcaaattccagttcttgttttttcgatcctgcgtttgtcaaagttccccagccggctttttcaaaaaaggcggggatttcttcccacgattgaagaggaaatttgcgggcgaggcgttttcccgcccaatacatcatcgatgaatgatccggaccgaggatatccggaagcacgatttcccggattaattcgtagccgtatgcgctgacgtcgagttcagttaaaggttctaaagctgcttcataattattcttcatattatgtattcccctctctccttcgtttattatagcttaaacaggggggaggattacaggatgatcctataaaacacgcgaaaaaatgtgagaaagatatcgcaggaaaataaaattttccctccagataatcaattccgaaaattataatttatgtacacgttttcttgacgcccttttgagggaggagtaaaatgaaattgtcaataaattttaataaagtgcttacaattgaaacgaagtgggggcagagattttagtacatttcgcacttaaatcaaacagggggtaaagtaatgtctgggaacagagagttttattttcgaagattgcattccttgctcggtgttattccggtcggcatctttttgatccagcatttagtcgtcaaccaatttgccgcaaggggagcggatgcgtttaacaaggcggccggctttatggacagtctgccgttcaggtatgcgttagaaatttttattattttcttacctttaatttatcatgcggtttacggtgtgtacatagcatttactgcgaaaaacaacgctggccactacagttatttcagaaactggatgtttgtgcttcagcgtgtcactggtattctcacccttattttcgtcagctggcatgtgtggcagacgcggattgccgcgcagatgggcgctgaagtcaacttcgatatgatggcgaatattctgagctcgccgtttatgctcggtttttacattgtaggcgttttatcggtcattttccacttttcaaacggcttatggtcttttgcggtcacatgggggatcacggttacgccgcgttctcaaagaatttcgacttacgtgacgctgattatatttttagcgctttcatacgtaggtttaaaagcgatttttgcgtttgtgtaagagaactagattactagagggagaggggctatcatgagtcaatcaagcattatcgtagtcggcgggggtctagccggcctcatggcgacaattaaagcagcggaatcaggcacggccgttaaattgttttccatcgttccggtcaaacgctctcactcggtctgcgcgcagggcgggataaacggagctgtcaacacaaaaggggaaggagactctccgtttgagcattttgatgacacggtatacggaggcgactttttggcaaaccagcctcctgtaaaagcgatgtgtgaagcggcgccgtccattatccacttattggaccgcatgggggttatgtttaacagaacgccggaagggctcttggacttccgccgtttcgggggtacacagcatcacagaaccgcttacgcgggagcgacgacgggtcagcagcttctttacgcactggacgagcaggtgcgcagatatgaagtggcgggtctcgtcacaaaatacgaaggctgggaattcctcggcgccgttcttgacgatgagcgcacgtgccgcggtatcgtagcccaaaatctgaccaatatgcaaatcgagtcattccgttctgacgccgttattatggcgacgggaggacccggaatcgtattcggaaaatcaacaaacagcatgatcaatacgggatctgccgcatcaatcgtctatcagcagggcgcttattatgcaaacggcgaatttatccaaattcacccgacagcaatcccgggggacgataaactgcgtctgatgagtgaatcggcgcgcggcgagggcggtagagtctggacgtacaaagacggaaaaccttggtacttcctcgaggaaaaatatccggcttacggaaacctcgtgccgcgggatattgcgacacgtgaaatctttgacgtgtgcgtgaatcagaaactcggcatcaacggagaaaacatggtgtatctcgatctgtcgcacaaagatccgaaagagcttgacgttaagcttggcggcattatcgaaatctatgaaaaattcatgggcgatgacccgcgcaagcttccgatgaaaattttccctgccgttcactattcgatgggcggactgtgggttgattatgatcagatgacaagcatccgcggactgttcgcagcgggtgaatgtgattattcaatgcacggaggaaaccgtttaggggcgaactctctgctttccgccatctacggaggaatggtggccggaccgaatgcggtgaaatatgtttccggacttgaaacatcagcggaagacctgtcttcttcattatttgattcctatgtgaaaaaagaagaagaaaaatgggccgatatcatgaagatggacggcgatgaaaatgcctacgtgcttcaccgtgagctcggagaatggatgacggccaacgtcacggtggtccgccacaacgacaagcttttgaaaacggatgacaaaatccaagagctgatggaacgctttaagaaaatcaatatcaacgatacgacaaaatggagcaaccaaggggcgatgttcacccgccagttctccaatatgcttcagcttgccagagtcatcacgctcggcgcatataaccgaaatgaaagccggggagcgcactataaaccggatttccctgaaagaaatgacgatgagtggctcaaaacgacgatggctaaacatgccggtccgtttgaagctccggaatttgaatatcaggatgtcgatgtatcactgattgcgccccgtaaacgcgactactcgaagaagaaggtggcgaaataatcatgagtgagaaaaagatacggtttatcattacacgccaggatacgcccgaaagcgcgccatacgatgaagaattcgaaatcaattaccgcccgaatctgaacgtgatttccgccctgatggaaatccgcagaaatcccgtgaatgcaaaaggagagaaaaccactccggtcgcatgggacatgaactgtcttgaagaagtatgcggcgcctgctccatggtcatcaacggaagaccgcgccagtcgtgtacggcgctgattgataagctggaacagccgatccgtctgaagccgatgaaaacattcccggttgtccgtgaccttcaggttgaccgcagcagaatgtttgattcactgaaaaaagtgaaagcatgggtgccgattgacggaacttacgatttggggccggggccgagaatgccggaaaaacgccgccagtgggcatatgaattgtctaaatgcatgacatgcggcgtctgccttgaagcctgcccgaacgtcaacagcaagtcgaaattcatggggcctgccccgatgtcacaagtgcgtctgtttaatgcccatccgacgggcgcgatgaacaaagcagaacgtttagaagctttaatgacagacggcggcctcggagattgcgggaattcacaaaactgtgttcaatcctgcccgaaaggcattccgcttacgacttcaatcgctgctttgaacagagataccaatttacaagcattccgtaatttcttcggaagcgacagagtataagaaagagaaaaagagcctcttccgcacgggagaggtttttttataaggagctgaaggtgatgaaacaaccgcaatatattgatatcccgtttgaagaatggagacagtcgttttctttctttactgaagtatcggttcgtttttcagaaacggatatgttcggccatatgaataatgtaacccctttcatctattttgaagaagcacggatcgcttattttaaacagcggggcatgacggcgcaaaactcggaaacgatgacggtcgtcgcaagccagcagtgcgactatatgcgtcaggtgatgccgtatgaaaatctgcggatttatgtgaaagcaagcgctgccggaaatgcgtccgtcacccttcattaccttggagaaaatgagtcgggcctgccgtgctttacaggttccgtcgttatggttcaagtgtcgaaaaaaagcggcaaagcggtcagctggacggagcgggagaaaggcattctgctcgcctgaacggataactatttctctaagagacgtcacctccgaagcgccctttacatatgatatcttgactatataaacccattcgtttcagattcgctctcaccttagcaaggagggttacaatacttgaaggagaaagattttcaatcaaagccgctgctgaccaaaagagaaagagaagtattcgaattgctcgttcaagacaagacaacaaaggaaattgcaagcgagctatttatcagtgaaaaaactgtacggaatcacatttcaaatgccatgcagaagttaggtgtgaaagggcgttcgcaagctgttgtcgagcttcttagaatgggtgagctagagctctgattcttgccggttttccttctttacgagaaggagccggttatttgcgttggcgcccgggctgatgggcatgcggtgaaaatcccggtttttcctttttctccgtcagtcttgcattttcttaaaaaaagaaggaaaatagacacggagcgcatagcccagaaagatccttgagtgagggatggacaaatgacatcaaaatctgtagagcatgttgcggatatcgaaaaatcactccgccatatcgctgcgatcattaaacaaaaaggaagagaaatccttaaccaatatgcaattacaccgccgcaattcgtggggcttcaatggctttatgaattgggggatatgacaataggcgaattatcaggcaaaatgtatttggcttgcagcacgacgacggatctgatagaccgcatggaaaaaaataagcttgtcgagcgggtcaaagacccggctgacagacgggtcgtcagaattcatcttctcgctgaaggagagcgcattatccaagaagtgattttgaaaagacaggcttatttgcgggatatgtttgcgacattttccgaagaagaaacagccgctttcgaaaaatcattattgaaactgcagcatgaaatgaaaagaaaatgaggcgattttgttggaacagccgataggagtcattgattccggggttggcgggttaaccgttgctaaggaaatcatgagacagctaccgaaggaaaatatcatctatgtgggagatacaaaacgctgcccgtacggcccgcgtcctgaagaagaagttcttcaatacacgtgggaaatgaccgattacctgctggaaaaccaccatatcaaaatgctcgtgatcgcctgtaatacggccacggccattgccttggaggatattcagcgcaaaacggatattccggttgtcggcgtcattcagccgggtgcgagaacggcgataaaggtcacgaaaaaccagcatatcggcgtcatcggcacggtcaataccattaaaagcagagcgtatgagcaggcgctgctcgggttaaacgcagaacttcaagttgagaacacggcttgtccgctgctcgtgccgtttgtggaaagcggacggtttcttcaggaatcagcggaggaagcggttgaagcatcgcttgaacctttaaaaggtacatcaattgacaccttgattttaggatgtacgcattatccgatcttaaaagacccgattcagaattatatgggagagcatgtgaaaatcatttcctccggagacgagacggcgagagaagtgagcaccatcttgtcttataaaggtttgttaaaccaatcgaaacatgcaccggagcatcaatttcttacaacgggagagcggaacggcttcgcaaaaattgccgaagactggttcggccacgaaatcggccatgtcgagtgcatctcccttcaagagccggtcagaaaataaatcaaaaaaaccccgctgtttacagcgggtttttttgcgcttcccggtctatttcccggacagggctcgtatacatcatagtacaaacagccttaggagggaaaagtatgctgaaaaaaggacctgcagtcattgctgcaacatgtcttacttcggcttttgtgttatctggatgcggtttgtttcaatccgataaaacagccggggaaattgacccgcctcaagacatttcatatgtaaaggatgaagcgggaattcaggcaaaaccaaagcagtcagagaaaaacggcacttctaaagccgaccagccggccaatacagtcatgcgagaactgtatctgattgataaaaacggctatgtcgcagcacagacactgcctcttccgaacagtgagggaaccgcaaagcaggcccttgagtacttggttcagggagggcctgtatcagaaatcctgccgaacggcttcagagcggtgctccctgcggatacgacggtaaatgtcgatattaaaaaagacggcactgcagtcgctgatttttcgaaggaatttaaaaactataaaaaagaagacgaacaaaaaatcctgcaatcgattacgtggacgcttacccaattcagctcaatagataaagtcaaaatcagaatcaacgggcacgaactgaaagaaatgcctgtgggcggcacgccgattacgggcgacttaagcagaaaagacgggattaatattgaaacggccggagtgaatgatctgacagacacccatccgctgactgtatattatctggcggaaacagagacaagcgaatactacgtgcctgttacaaagcggattgacaattcggaaacaaatgacatcaccgctgccgttgaacagctcaccgacggaccgggcaaagcaagcgggcttttgacggactttaataacgatgttaagcttctcagcaagccgaaagtgaaagacggccaggttacactggactttaacagctctatttacggaagcgccgacgaaaaaacaaaaatggtgtcatcgggcgtactggacagcatcgttctcacgttaaccgaacagccgtcgattaaaagtgtttctataaaagtaaacggaaaatcagaactggtgaatgaaaaaggagaatccctttcaaaacctgtttcgaggccggcacaagtgaatacgggtagtttttaatttgcgatttttgatatactagtaaaaaagaggttagcgttccggctgcctctttctttattcacaatccggaacaaaaggtttatgtacatataatcggaggtaaaatatgagacacgacggaagacagcacgatgagctgcgccctatcacatttgatttggattttatcactcacccggaaggctctgttttaattacagcgggaaatacaaaggtcatctgtaatgcatctgtggaagaccgggtgccgccatttttacgcggcggaggaaaaggctggatcacagcggaatacagcatgcttccccgcgcgacgaatcaaagaacgataagagaatcttcaaaaggaaaggtctccggcagaacgatggaaattcagcggctgatcgggcgcgcgctccgggccgtcgttgatttggagaagctcggcgaacggacgatctggatcgactgtgacgtcattcaagctgacggcggaacaagaacggcttccattaccggcgcattcttggcaatggccattgcgaccggcaaactcgtaaaaagcggcgttatcaaaacctctcccgtgacagattatctcgcggccatttctgttgggatggataaagaagaaggccttcttttggatctgaattatgaagaggattcggcggctgaagtcgacatgaatatcatcatgacgggaagcggacgttttgtagagcttcaagggacgggcgaagaagccacattctcccgtgaagatttaaacggactgttaagccttgccgaaaaaggaatccagacgcttattcaaaagcaaaaagaagtgctgggagaaacattgcctgaactgaaataagaaagagaggcctgatcagcgtgaaagaagtcattattgcgacacacaatcagggaaaagtgaaagaattcaaggaaatactcgaaccgaaaggctacagcgtctcttctttggcggaaatcggatttacggaagaaattgaggaaaccggacatacctttgaagaaaacgccatcttaaaagcggaagccgtggcaaaagccgtcaacaaaatggtcattgcagacgactccggtttatcagtggacaaccttggaggcagaccgggcgtttattcagcccgttatgccggagaagcaaaagatgataaggcgaatatggacaaggtgctgtcagaattaaaaggcatcgaaaaagagcagcgcacggcccgtttccgctgcgcccttgccgtcagcatgccggggcaggaaacaaaaacggtcgaaggtcatgttgaagggtatattgcagaaggacccgaaggagataacgggttcggctatgatcccatttttattgtaaaagataaagataaaaccatggcccagctgacaagcgctgagaaaaacaaaatcagccacagggctgaggcgctcaagaaactgtcaaagctgcttgattcataagggggagcgtatgcaatgaaagtgctgataataagtgacagtcacggccttgaagacgagctggagacgattgcaaagcggcacgaagacgaagcggatctgatgattcattgcggtgattcagagcttgacgccgcacatccggcactcacgccgtatcacaaggtgaaaggcaattgcgactttggcggcgggtttcaggatgaactccttctggatgccggttcaaagaaaattctggccgttcacgggcatcttcacggcattaaacagtcacttttaactgttttttaccgggcggaagagcttggggcggatatcgtctgcttcggccattcacatattgcggggagtgaagtgcttcggggcaagcttttgattaatccgggcagcatccgtcttccgagagtccgcaatgtgaaaagctatgccattcttactcttacagaaagagaaggcgccgtgacattttacgacgaaacgggtcgggaattgaaggacttggggaatacaatcagtttttaacaagtgatgggggagatttcattcttccccatcaaaagttttttaaaaaatattgacttatgatttgaacctgtatataataaatcttgtcgctgatacataaagcaaaagctgtcccagtagctcagctggatagagcaacggccttctaagccgtcggtcgggagttcgaatctctcctgggacgtacaaaaaaagagctggtgacatcagagtgaaaactgatgccgctggccttttttatcggatgactatattgtcaattcactgatatcatggtaaaataatcagcagatatttgtttttcatgtcccagtagctcagccggatagagcaacggccttctaagccgtcggtcgggagttcgaatctctcctgggacgtataaaaaacctcaagccctgacaatgggtttgaggtttttttgtattttatttttagttttacgaaacaaaagttccgtatttgatgaaaattgtaaagtaattttaatgtaaatgaaacttaatgtaatatttaccgtaataaatatatgtataaagatacttaaggcgcccttgagtgataaattatctgatttctatcatacgttttgttgatgattgatagaaagacagcaggaggaattagcttttgaagtacgcatttgcatataaaaatcacaatatagaaacgatcttttgcggaaaagacgagctgtttgaggaactgaaacaatttttaatcactcaatgcggtttaatcattgttgaggtttcaagggctgattactatacggagcaggaaatgaatcagtggaatgaacgttatactctgtgaataagaaaagaaaccggccgtgtgagaccggtttttgtatcatctgaatccgctcggagcgctgaagcccccggcatggccgctgaaaccgccaccgagcgcgccgggatgtgccccggcgccgaggcttccgccgacgtcactgaaggtttggccgtagtacccggatgtataagggtacggaacgaattgctgtccggcgaatgacagtgtgctttgcggggtctgctgtccgtatccggatggcggaaatccctgctgaaaagaagggccgccttgatatggtgctgtatgcatcggggccggaggatagtaagactgcggcggtaagaccggtaaaggcggaaatccaggaggcaggccctgcatgcctgataacatcttattcatgacatcactcatttcttacgagataagaacagtgtatgcgtatgtctgtataaagagcctgttcaatcgaacggaatatctgacaagcatgccggaaggacagagaaaaatcgcgtaataaaatgtgacatattcgtatatgaacggaaaaatttcatgtaatcttgagagattaataaaaaaaatataaaaacttttaacatttgccgatccttttatatcagtaatgaaagcgtatacaaaatagattgattaatctaaattgtctaataattataaaaatgctgttgacactgtctgcaaacgggcgtaatatgagttcaaacaaaaataaataaatgattcacactaaaaagaaaaatcataaaacactgaaaaaacaaacaaatgaaggttcttttttaataaaagagctgccataataaaaagcgcagaagaggataagtagctttgctgaagtttttcacagagagccggtaacgctgagagccggtaaaacaaatcaaagtgaactcccctcagagtgccggtctgaaatgtaaagagtaggactcggccgagtgaacgcaatgtttactcgttatcaaaacggataatcattatccatgagacggtctgcatatgaccgtaaacaagggtggtaccgcggagagcaaagccttttcgccccttttggctatcgcatgaaatgcttggctgaatgtgggtgggaaggcttttttatttgcgtcagccggcgctgcgttttatgaattggattttagaagggaacattgaaaaggaggaactgaaaatgggcacaaatgtacaggcggattctttgtctgccgattgtacaaaaacaatgaacggggctctgatgctgattgaatcattaaagaaagaaaatgtcgagatgatcttcggctatccggggggagccgtccttccgatttacgataaactgtatcaatcaggattggttcacatcctgccccgccacgagcaaggcgcgattcatgcggcagaagggtatgcgagagtctccggaaagccgggggttgtgattgctacctccggacccggagcgacaaatttagttaccggtcttgcggatgcgatgattgattcactgccgctcgtagtgtttaccggtcaggtcgccacttcggtcatcggcagcgacgctttccaggaagccgacattttaggaattacgatgccgattacgaaacacagctaccaagtccgccgtccggaagatctcccccgtgtgattaaagaggcgttccatattgccacgacgggaagaccgggcccggtattaattgatataccgaaggatgtcgcagcatttgaaggagaattcagatatgatcacgagatcaatcttccgggttatcagccggtaaaagagcctaactatctgcagatccgaaagctcgtggaagctgtcagcagtgcgaaaaagccggttattttagccggagcgggtgttttgcacggtaaagcttcagaagatttaaaaaattatgccgaacagcagcaaattccggtagcgcacacgcttctcggtctgggcggtttcccggcagaccatcctctttttctgggaatggcggggatgcacggcacatacacagcgaatatggcgctttaccactgtgacttgctgatcagcatcggagcgcggttcgatgatcgcgtgaccggaaatctgaagcattttgcaaaatcggccaaagtagcgcatatcgatattgatcctgctgaaatcggaaaaattatcgaaacgcagattccggtggtcggcgacagtaaaatcgtccttcaggaattattgaagcaaaacggaaaacagggacagacagaggaatggaaacagcagctttcagaatggaaagaagaatatccgctttggtatacagacgacagagaagagggcttgaaaccccaaaagctgattgagtatattcaccaattcacaaacggtgaggcgattgtggcgacggatgtcggccagcaccagatgtgggcggctcagttttatcctttccgaaaggctgataagtgggtgacctcgggggggctcggcacaatgggcttcggccttccggcggccatcggagcgcagctggccgatcgtaacgccacggtcgttgccatcctcggagacggcggttttcagatgacccttcaggaattagatgtcatccggcagctgaatcttcctgtcaaagtggttatcttgaacaacgaatgtctgggcatggtcagacagtggcaggaaatcttctatgaagaacgctattctgaatccaaattctcggcgcagcctgactttgtcaaattgtcagaagcctacggcattaaaggcgttcggatttcatcggaagaagaggcggaagaagagcttaaaaaggcgctttcatcaaaagaaccggccgttattgacgtccgggtcgccaaaagcgagaaagtattcccgatgatcgcgccgggtaaaggacttcatgaaatggtgggggtgaaaccttgaaacgcattatcacattaacggtggtcaaccgctcgggggtattaaaccggatcaccggcctgtttacaaaaagacactataatatcgaaagcatcactgtaggccacacggaaacaagcggtgtttcaaggattacatttgtcgtccatgtggaaggcgaaaatgacgtagagcagctgacaaagcagcttaacaaacaaattgacgtcctgaaagtgacggatattacaaaccaatcgattgtacagcgtgagctggcattaatcaaagttgtttccgcaccgtcggccagaacggaaatcaatggaatcattgagccgttcagagcttccgtcgttgatgtctcaagagacagcatcgtcgttcaggttaccggcgaatctaataaaatcgaagcgctcatagagcttctcaaaccttacggaattaaagaaatcgcgagaacgggcacaacggcttttgcgaggggaacccagcagaaggcgtcatccaataaaacaatttcaattgtataacacaaaaaagggagagattaaaatggtaaaagtatattataacggtgatatcaaagagaacgtattggcaggtaaaaaagtagcgattatcggttacggttcacaaggtcatgcacacgcgctgaacttaaaagaaagcggaattgatgtcattgtcggcgtcagacaaggcaaatcatttacacaggcccaagaagacggtcataaagtcttttcggtaagagaagcggctgcccaggctgatatcattatggttcttcttccggatgagcagcagcaaaaagtatatgaagctgaaatcaaagatgaattgacggcgggcaagtcattggtattcgcacacggatttaacgtccatttccatcagatcgtgcctcctgctgatgtggatgtattccttgtcgcccctaaaggacctggacaccttgtcagaagaacatatgaacaaggcgcgggcgtaccggcattgtttgccatctaccaggatgtatcaggcgaagcgaaagatacggctcttgcttatgcaaaaggaatcggcggagcgcgtgcgggggttcttgaaacaacatttaaggaagaaacggaaacggatttgttcggtgagcaggctgttctgtgcggaggtttaacggcgcttgtcaaagcgggttttgaaacgctgacagaagccggctaccagcctgaactcgcatacttcgagtgtctgcacgaactgaagctgatcgtagacttgatgtatgaagaaggattggcgggcatgagatactctatttccgatacggctcaatggggagactttgtatcaggaccgcgcgtagtcgatgcgaaggtaaaagaatcgatgaaacaagtattaacggatattcaaaacggtacattcgcaaaagaatggatcgtggaaaaccaagtgaaccgtcctcgtttcaatgcgatcaatgcaagcgaaaacgagcatcagattgaaaaggtcggcagacagcttcgtgaaatgatgccgtttgtcaaacaaggcaaaaagaaggaagcggtggtctccgttgcgcaaaattaatgttttcgacacgacccttcgtgacggtgaacaatctcccggggtcaacctcaattcccgggagaaactggcgatagccaagcagcttgaaagactcggggtggacattattgaagcgggatttcccgcttcatcccgaggtgattttttagccgtgcaggaaatcgcaagaacgattaaaaattgttcggtaacagggcttgctcgatctgtcaaaggtgacattgacgcagcctgggaagcgctgaaagacggggtcagcccgcgcattcacatctttatcgccacctctgacattcatctgaagcataagctgaaaatgacgcgggaagaggttaaggaaaaagcggttgaaatggtgaagtatgcaaaagaacgctttccgatcgttcaatggtcggcagaagacgcatgccgcaccgaacttccgtttctggctgaaatcgtagaaaaagtgattgatgccggcgcgagcgtcatcaacctgccggacactgtaggttacctgacgcctgctgaatacggaaacatctttaaatatatgaaggaacacgttccgaatatcagccgggtaaagctctctgcccattgccacgatgatctcggaatggcggttgccaactcactttcggcaattgagaacggcgctgatcaaattgaatgcgccattaacggcataggagaaagagccgggaacgccgcgctagaggaaatcgccgttgcgcttcatgtcagaaatgacgcgcatcaagccgattcatctctcaatcttcatgaattgaagcggacgagtgatcttgtcagcaaactgacgggcatggccgttccccgcaacaaagcaatcgtcggagataacgctttcgcacatgaatccggcattcaccaagacggtttcctgaaagaaaaatcaacatatgaaatcatttcaccggaacttgtcggcgtgactgctgatgcgctcgtactcggaaagcattccggacgccatgcgttcaaagaccgcctgaatgcgcttggattccagtttgatagtgaggaaatcaataaattttttacgatgtttaaagaactgaccgaaaagaaaaaagaaatcaccgatgatgacttgatttctcttattttagaagaaaaagtgacggacaaaaaaatcggctatgaatttctgtctctgcaagtgcattacggaacgtctcaggtgccgactgcaacagtctctttgaaaaatcaggaaaacgaacagctgattcaagaggcggcaacgggggcgggcagcgtagaagccgtttataatacgctcgggcgctgcatcgataaaaatattgaactgacagactaccgcatccaatccaaccggaaaggcgaagacgcgctggctcaagtttatgtcagagtgaccgtgaacggaaaagaaacatcagggcggggaatcgcgcaggatgttctggaagcttctgctaaagcttatctgaacgccgtgaatcggcagttggtgctggattgcaatttagacggattaaagagacggactgcggtcggctcgtaatagaaaggagaacgtttgatttgaaaaaacgcattgctttgcttccaggtgacggaatcggaccggaagtggcggaatcagcggcagatgtattgaaaagcgttgctgaacaattcggacatgaatttgaatttgaaaacgggctgatcgggggagcagcgattgacgcccatcaaaacccccttcctgaggagacggtggctctttgtgaaagatccgacgccatcctgctcggggcagtcggcgggccgaaatgggaccaaaaccctccggagctcagaccggaaaaaggcctgctcggcatcagaaaaaagctcggcctgtttgccaatctgcgtcctgtgaccgtatttgaaagcctgtctgaggcgtctccgctgaaaaaagaatatatcagcggcgtcgactttgtaatcgtcagggaactgacgggcggcctctacttcggagaaccgagcagacagtatgtcaatgaagcgggagaaaaggaagcggtcgatacccttttttataagaaagaagaaatcgcacgcgttgtcagagaagcctttaagatggctgccggcagaaaaggaaaagtgacgtccgttgataaggcgaatgtgctttcttcaagcagactgtggcgtgaaacggcagatgaaatcgcaaaagaatttcctgatgtgacgcttgaacatatgcttgtcgataatgccgcgatgcagctcatctacgctccgagccagtttgacgtcatcgtaactgaaaatatgttcggcgatattttaagcgatgaagcctccatgctgacaggctcgctcggcatgctgccgtcagccagtttatcaagttcaggtcttcacttgtttgaacccgtgcatggatctgcgcctgacatcgccggtaaagggatggccaatccgtttgcggcgattttatcagcggcgatgcttttgagaacatctttcggacttgaaaacgaagcgcaggcggtggaaaaggcggtcgcaaaggtgcttgcagacggcagccgtacacgtgatatcgcccgggacggccaatatgccggaacgcatgacattactgaaaaagtaaaagccgcattagccggctcgaatacaaaatctatagtatgacgctttaaagaaagcggtcttagttcaataggtagagggaggaaacaaagatgatgcctcgaacaatcatcgaaaagatttgggatcggcatgttgtaaaaagcggtgaaggaaaacccgaccttctctatattgatctgcacctcattcatgaggtgacgtctcctcaggcgtttgaagggttaaggcagaagggaagaaaggtcagacggccgcagaacacgttcgcgacgatggaccacaatattccgaccgtcaaccgttttgacattaaagatgaagtcgcaaagcgccaagtaaccgcgcttgaacggaattgcgaggagttcggcgtccgtcttgcggatcttcacagcgcagaccagggaatcgttcatgtggtcgggcctgagcttggtctgacacttccgggaaaaacgatcgtttgcggagacagccatacatcgactcacggcgcgttcggagcgcttgccttcggtatcggcacaagtgaggtggaacatgttctttccacacagacattatggcagcagcggccgaaaacgcttgaaatccgcgttgacggaacgctccaaaaaggagtgacagcgaaggatgtcatcttgtcggtcatcggaaaatacggggtgaaattcggtaccggatatgtcattgaatacaccggggaagtattcagaaacatgtctatggacgaacgcatgactgtctgcaatatgtcaatagaagcgggagcccgtgcgggactgatcgctcctgatgacacgacgattgaatactgtaaaaaccgtaaatacgcgccaaaaagcgaggaatttgaaaaagccgccgcagaatggaaagcgttaaaaaccgatccgggcgccgtatacgatcattccatcgtgttagacggcagcgagatttctccaatggtaacatggggtgtcaatcccggcatggttcttccggtcgatgcccaaatacctgcgccggaaacgattgattctgaagacggtaaaaaagaagccatccgcgcttacgaatacatggggatcgcgccgaatcaaaaaattgaagatattaaagtcgagcatgtgtttatcggctcctgtacaaattcacggatgaccgatcttcgccaggctgcggatatgatcaaaggccgaaaagtcgccgacagcgtcagagccattgtggtgccgggttctcaaagcgtgaaacagcaggccgaggaagaagggctgcaccgcgtgtttctcgaggccggctttgaatggagggaatcaggctgcagcatgtgcctcagtatgaacaatgatgtcgtgcctgaaggggaacgatgcgcttccacttccaaccgcaacttcgaaggcagacagggaaaaggcgcgagaacacaccttgtcagtccggcgatggcggcaatggcggccattcacgggcatttcgtcgatgtaagaaagttttatcaagaaaaaacagttgtgtaaggagtgcgcgaaaagatggaacctttaaaaacgcatacgggaaaagcggccgtcttaaaccggatcaacgtcgatacggaccagattattccgaaacagtttttgaaaagaattgaaagaaccggatacggcagattcgcgttttttgattggagataccttgagaacggtgagcctgatcctgaatttgaattaaaccgcaaagtctatgaaggcgcgtccatattaattgccggagagaatttcggctgcggatcatcccgtgagcacgctccttgggcgctggatgattacggcttcaaaatcatcattgctccgtcatttgccgatatttttcatcagaactgttttaaaaacggtatgcttcccatccgtatgccgtatgatcagtggaaaaaactcgccggtcaatatgaaaatcagtctctaaatatgacggttgatttggaaaaccagctcattcacgacagtgaaggaaaagagatttcatttgaagtcgatccgcactggaaggaaatgctgattaacggttatgatgaaatttcattaacgcttctgctggaggacgacattcagcagtttgaatcgaaaagaagttcatggcttcaagcctgaaaaaagccgcccggcatctgtccggcggctttttttaccgtgtgcatcatcctttcttgtgtttcatgacgcgtgttgatacacttgaacaaaataagcgcctgaaaggaaataaagtatgacgcatgacaagaaaaaagctgatatcattcctttcccccgtctgaaagaacgcttggttgataaagggatggccgccatgaaggataaacagtatgaggaggccctcgaactgttttcagaggcggtaagccacggcgataccgagtccgacgtacatttaggcatggcgatttgttttctggaactcggggaattggaagaagcaaaacaagtttgcgagaaaatgctgaatgaagggtacggccattatttcaccgtattgcaggtgtacatgaccattttaattcagctgaaacaatatgaagaagtcaaaagcacaattgaagctgtgctggaagaaaaccagctgcccgcagaaagtgcggagcaattctaccggctgctcgaattcagccgcaaaatgaccgatcccgatcagcaggaggaggcgtgggaggaggaatacgaggacattcttgatacggaaaaagtgctgaacagccccgctgaacaaatgaatctgattcattctcttaaagaccgcaatattgcaaaatacacgggtctcttaaaaacgattcttcaagatccgggcgcgcatcctcttattaagacaatgattttgacgctgatggccgagcacgactacagtaaaccggtccatattacaaaattcggcgattcaatgaccgcgataccgagtgaaacggtccagcctgatgcggctccgattttgcatcgcgttctccgggtgcttgatgaaacgctgggcaatgaaaaccctacattatatgctgccgtcgaggagctgtggagaagacatctgtacgtcctgcacccttttatgccgaagtttttgaacgcggatttatgggcggcggcgcttcataaggtcggttacgagatgcacggcattgacattgagccggaggaacttcatatgatgtacgagtttgacagccgcgaactcgaagaagcctgcacgatgattaaggatattgaagaaatttcttatttgtaaatcacaccatatagttgaaagcggtaggcgttatgttataatatagtggttgtatttatgtatagcggtttaactgaaatgagaattacggttggacaggctgccagttcattacataatgattctgattcaaagcggttttttctttgacaaagccgcggattgctttagaatggaagaccgacacaacctgaatagatttttggagggaaacacatgtctgtaaaatgggaaaaacaagaaggcaacgaaggcgtattaacggttgaagttgatgcggatacgttcaaaacagctcttgatgatgcatttaaaaaagtagtaaaacaggtttctattcctggattccgcaaagggaaagttccccgcggtttattcgaacagcgtttcggcgttgaagctctttaccaggatgctttagatattttacttcctgtagaataccctaaagcggttgaagaagccggcattgagcctgtagaccgccctgaaatcgatgttgaaaaaatcgaaaaaggcgaaagcttaattttcactgcaaaagtgactgtaaaaccggaagtgaaacttggcgattacaaaggcttaggaatcgaaaaagatgacactgccgttactgacgaagatgtacaaaacgaacttaaagcgcttcaagagcgtcaggctgagcttgtcgtgaaagaagaaggcgctgttgaaaacggcgatacagtcgttcttgacttcgaaggtttcgttgacggcgaagcgtttgaaggcggaaaagctgagaactactcacttgaagtaggatcaggttcattcatcccgggcttcgaagagcagttaacaggccttgaagcaggcgctgaaaaggatgttgaagtaacattccctgaagagtaccacgctgaagagcttgccggaaaaccagctgttttcaaagtgaaaattcatgaaatcaaagcgaaagagcttcctgagcttaacgacgaattcgcaaaagacattgacgaagaagttgaaacgcttgctgaattaaccgagaaaacaaaaaaacgccttgaagaagcaaaagaaaacgaagctgacgctaaattgcgtgaagagcttgttctgaaagcatctgaaaacgctgaagctgatgttcctcaagcgatgatcgacactgagcttgaccgcatgctgaaagaattcgaacagcgtctgcaaatgcaaggcatgaaccttgagctttacactcaattctcaggccaagacgaaaacgcgttaaaagagcaaatgaaagaagatgccgcaaaacgcgtaaaatcaaacctgactcttgaagcgatcgctcaagcagaaaaccttgaagtaacggacgaagaagttgaagcagagctgactaaaatggctgaagcttacaacatgccggttgaaaacatcaagcaggcaatcggttcaactgacgcgatgaaagaagatttaaaagttcgaaaagcaattgattttcttgtagaaaaccgttaatatggttcataataatagacataataaaacagggcgcgattaattcgtgccttgttttgtacaattatgatataactctttttcttggggcaagatagtcattgccgggctgtttttcgtcatacatatagaatgtgcaagtgcgaaacacattgttaccgtcttactggaaagtatggtaaaatgcaatacatactcgatcgtagcaagaaccgttttcttttgcccttcaggtaaaagaaaaagtgagacaagattaaggggtgaaagaatgtttaaattcaacgaggaaaaaggacaattgaaatgctcgttctgcggaaaaacgcaagatcaggttcgtaagctggttgcaggaccgggtgtatatatatgcgacgaatgtattgagctctgtacagaaatcgtagaggaagagcttggtacggaagaagaagtcgaatttaaagacgttccgaagccgcaggaaatccgtgagattctgaatgaatatgtcatcggacaggatcaggcgaagaaatcacttgcggttgcggtatacaaccattacaaacgcatcaattccaacagtaaagtggatgatgttgagctttctaaaagtaatatttctttaatcggaccgactggaagcgggaaaacacttcttgcccagacgcttgcgcgtattctgaacgttccgtttgcgatcgcggacgctacatctctgactgaagccggatatgtcggtgaggacgtagaaaacatcctcctcaagctgattcaggcagcagactatgatgtggaaaaagcagaaaaaggcattatctatatcgatgaaatcgataaagtagcgcgaaaatctgaaaacccgtccattacacgcgatgtatcaggcgaaggcgttcagcaggcgctgctgaaaattcttgaaggaacggttgcaagcgtgccgcctcaaggaggacgcaaacatcctcatcaggaattcatccagatcgatacgacgaacattctgttcatttgcggcggtgcatttgatggcatcgaacaaatcatcaaacgccgtctcggacaaaaagtcatcggcttcggctctgataataaagcggcagacctggaaaaagaagaactgctttctaaagttcttccggaagacctgctccgtttcggtctgattcctgaattcatcggccgtcttcctgtcattgcaagccttgagcagcttgacgaaacggcactggttgaaattctgactaaaccgaaaaacgcactcgtcaaacaatacaagaaaatgttagaacttgatgatgtcgagcttgaatttgaaggcgaggcattatctgaaattgcgaaaaaagcgatcgagcgtaaaacaggcgcacgcggcctgcgttctatcattgaaggcatcatgcttgacgtcatgtttgatctgccgtcccgcgatgatattgaaaaatgtgtcattaccggagcgacagtcgcagacggtgaagcgccgcgtcttgtattaaaagacggtactgttgtcggccaagataaaacatcagcataacacgacaaaacctcctgacccgaattaatcaggaggtttttttcttgtcctgacccttctgaaaatgtttattccgggctttgctgggagatactagcggacagaggaatgaattggatacataaatcgttttttcaggagggaccagcatgagttggacagggatcgcattatttgtacagctgtttttcgggatagtcatcggactatatttttggaatctgctcaaaaaccagcgaacacaaaaagtgacgatagataaagaatcaaaaaaggaaatggaacagctgcgcaaaatgcgcgccatcagtttatcagaacctttatcagaaaaggtgcggccgaaaagctttcaggacattgtcggccaggaagacggaattaaagcgttaaaagcagcgctttgcggaccgaacccgcagcacgtcattatttacggtcctccgggagtcggtaaaacggctgcggcgcggttggtattggaagaagcgaaaaagcataaacagtcaccgtttcaaaagcaggctgtttttgttgaacttgatgcgacgaccgcgcgatttgatgaacgggggattgccgatccgcttatcggttcagtgcatgatccgatttatcagggagcgggtgcgatgggccaagcaggcattccgcagccgaaacagggggctgtgacccatgctcacggcggggtattgtttattgatgaaatcggcgagcttcacccgattcagatgaataaaatgctgaaggtgcttgaagaccgaaaagtatttttagacagtgcgtattacagtgaagaaaatacgcaaataccgaatcacatccatgatatttttcaaaatgggcttccggcggatttccgtttgatcggagcgacaacgagaatgccgactgaaattcctccggccatccgttcgcgctgtcttgaagtatttttccgcgagctggaaaaggatgaacttaaaatcgttgcgaaaaaagcagccgacaaaattcagaaagagatttctgacgaagctctcagcgtgctgaccgcatatacgagaaacggacgtgaagccgtcaatatgatccagatcgctgccggcatggcggtgactgaggacagaaaagaaatcacgactgaagatatagaatgggttgttcattccagtcagctcacacctaaaaatgagcagaaaatcgccgatgaaccgcaagtcggcatcgtgaacggacttgccgtctacgggccgaacagcggcgcattgctggaaatcgaagtgaatgtcacacctgcgcaggacaaaggaagcctgaatatcacgggaattgcagaggaagaaagcatcggcagccaatcgaagtcgatccgccgcaaaagcatggcgaagggatctgtggaaaatgtgctgacggttctccgcacaatgggcatcaaaccttcagactatgacattcacgtcaattttccgggcggaggcccgattgacggaccttcagcaggtatcgcgatggccgcggggattttttccgcgattcaccgcatcccgatcgaccatacggtggcgatgacgggagaaatcagcctgacggggcttgtcaaaccgatcggcggcgtcattccgaaaattaaagccgcaaaacaggccggagcaaaaacggtcattatcccttatgaaaatcagcagtccattctgaaacgaatagacggaatcaccattaaagcggtaaaaacgttccaggaagtgcttgacgtcatattggttgaccctccttcagaacaaaaaccgtttgatatccaaatgaataaagaatccgtataaaccccatttttataatggggtttttttatggaggacatcttttcctttttcagaacagaaagaaagggtatactacgaagagactgttttatatacagggcaggcggataagccgattaaagcccgatcccggaattgtacaacgatgaaaaagttgtattataatggttcatactaaagtcacggaggtgtcagtcacatggcagaagatacaaaacgcagcatcccgctcctccctttaagaggcttattggtatacccgacaatggttttacatttagatgtaggccgtgacaagtcggttcaggctcttgaacaggcaatgatgcatgatcatatgatttttttagccactcagcaggatatttcgatagacgaaccgggtgaagaggatattttcgccgtcggcacttatacaaaaattaaacagatgctgaagctgcccaacggtacgatcagagtgcttgtagaaggaattcagcgggcgcagatccttgaatacaccgaactcgaagattatacttcggtcgatatacagctgatgcatgaggatgattcaaaagacgtggaagacgaagcgcttatgcggacgctgctggaccattttgaccagtacataaaaatttctaaaaaaatttccgcagaaacgtatgcggctgtgactgatattgaagagcccggcagaatggcggatatcgtcgcttctcatctcccgctgaaattaaaggacaagcaggacattctagaaacggcggatattaaagaacgtctgaataaggtcattcgttccattcataatgaaaaagaagtgctggagattgagaaaaaaatcggtcagcgcgtcaaacgttcgatggaacgcactcaaaaggaatattatttgcgcgaacagatgaaagccattcagaaggagcttggcgacaaagaaggaaaaaccggcgaagttcagtcgctcacggaaaagatagaagaagcaggcatgcctgagcgtgtcaaagaaacggcgcttaaggaattaagccgttacgaaaaagtgccgtcaagctcagcggaaagctctgttatccgcaactatattgactggctcatcgcccttccgtggtcggatgaaacagaagataaacttgatattaaaaaagccggggaaatcttagataaagagcatcacggcttagagaaagtgaaagagcggattttggagtatttggccgtgaaacagctgacgaaaacgctgaaagggccgattctttgtctggccggacctccgggagtcggtaaaacatctcttgcaaaatcaatcagtaagagcatggggcgcacttttgtgagaatttcactgggcggagtgcgcgatgagtctgaaatccgcgggcaccggcgcacatacgtcggggcgatgccgggccgtattatacaggggatgaaaaaagccggcaaacaaaatccggtctttctcctcgacgagatcgacaaaatgtcgtctgatttcagaggcgatccgtcttcggcgatgcttgaggtgctggatccggaacaaaacagcacattcagcgaccactatattgaagagacgttcgatttatcgaaagtactgtttatcgcgactgcgaataaccttgcttccatccctggccctctcagagacagaatggagattatcagcctgtcaggctacactgaaaacgaaaagctggagatcgtgaaagatcacctgctgccgaaacaaatcaaagagcacgggctcacaaagagcaacctgcagattcgggatcaggcgattacggacatcatccgctactacacgagggaagccggcgtgagaacgcttgaacgccagattgccgccatttgccgaaaggctgcgaaagccattgtgtctgaggagagaaaacgcattaccgttacagagaaaaatctggccgactatctcggaaaacggatattcagatacggacaggcggaaaccgaagatcaaatcggggttgtcacggggctcgcgtatacgacggtcggcggagatacgctgtcaatcgaagtgtcattgtcaccgggaaaaggaaagctggttctgacagggaagcttggagatgtcatgcgggaatcagcgcaggccgctttcagttatgtccgttcgaaagcggaacagttcggaatcgacccgaaattccatgagaagtatgacattcatatccatgtccctgaaggagcggtgccgaaagacggcccttctgccggaattacgatggccacggcgctcgtttcagcattaacggaccgtgcggtaaaacgcgaagtcggtatgacgggagaaatcacgctgcgggggcgcgtgcttccgatcggcggactgaaagaaaaggcgctcggcgcgcacagagcgggcctgaccactattattgcgcctaaagataacgaaaaagatatagaggatattccagaaagcgtcagagaaggactgaagtttatattcgtttctcacctggatgacgttttggaacatgccttagtaggagagaagaaatgaaagtcacaaagtcagaaatcgtgatcagcgcggtcaaacccgaacagtaccctgatggggggcttccggaaatcgcgctggcgggcagatcaaatgtaggaaagtcatcttttatcaattcattaatcaatcggaaaaacttggccagaacgtcatcaaaaccggggaaaacacagactttaaacttttacatcatcaatgatgaattgcattttgtcgacgttcccgggtacggatttgcgaaagtttccaaaagcgagcgggaagcatgggggagaatgattgaaacctatatgacgacccgcgaagagctgaaagcctgcgtgcagattgtcgacctcagacacgcgccgtctgctgaagacgtgaacatgtatgaattcctgaagtattacggcattcccgtcatcgtcattgcgacaaaagcggataagattccaaaaggaaaatgggacaagcacttaaaggttgtcaaacagacgcttgatatggatcctgaagatgagctgattttattttcctctgaaacgaaaaaaggcaaagatgaagcatggggagccattaaaaaaatgatcagccggtaatgaaaaacccaaaacgcagtgcgttttgggttttatcgtatagttttgttccgcttgataaacaataataaaaggctgattccgatgaaaacatacggccagtatgttttgaagtgttccgtcggaatatggacggactccagccacgccgtaatttgtttaaagaagtataaaaagagggaaaaaccaatcatggcagccgcttcgtatacatattcttttctggcagccgcaaataaggagaatccgaagacgaagagaatcatttcaaaatctcccggccaccatgagagctcaggtttggcgaaaaagtgtaaacctatgccgaaaagaagcatgccgatcaggacgtgaggcccggccgcttcctttttgccctgatacaagagcacagcccccaagagcataaggagcaccggccattccccctgattcgcaaacaggtgaacctgtccgctctgaagccatgcaaataatgaagcggcaagcagaagtcccggtaataaaattgatgtttttttcatcctgtcacctacccgcagtaaaggatttttagtatgatgattacagtgggaacgagctttttatactatagcataacatttttgaaatctgttcacattttcccgaagaaactatgttataattattataaataataaattctatgttagaatgattataaataaattgcgatgtacgggggtgcatgaaagcgatgcatattcttgttgtgggagtagattataaatccgcccctattgaaatacgcgaaaaaataagttttcagccggatgagcttgcagaagcgatgctccgcttaaaagaagaaaaaagcgttctagaaaacattatcgtgtcaacctgcaaccgcaccgaaatatatgcggtggtcgaccagcttcataccggccgttattatataaagacatttttatccgaatggttctcgctgccgaaagaagagctgtctccgtttctgaaattttatgagagcgacgcggcgatcgagcatttattccgtgtggcgtgcggtttagattccatggtcatcggagagacgcaaatactcggccaggtacgctcgagctttaaaacggcgcaggcagaaaagacgatcggcaccattttcaatgagctgtttaaacaggcggtgaccgtcggcaaacgcacgcatgccgaaaccgatatcggctccaatgccgtttccgtcagttacgccgccgttgaactcgcgaaaaaaatcttcggctcattgtcaaataagcacattttgattctcggtgcgggaaaaatgggcgagctcgccgcagaaaacctgcacggtcagggtatcggcaaagtaacggtcatcaacagaacgtttttgaaggcaaaagcgcttgctgaccgtttctccggagaagcgcgcagcttaaaccagcttgaatatgcacttgctgaagctgatattttaatcagttcgacaggcgcgagtgatttcgtcgtgtctaaagaaatgatggagagagcgggcagacagcggaaaggccgtccgttatttatggtggatatcgctgtgccgagagacctcgatccggcgcttaacgatcttgaaggtgtttttctgtacgatattgatgaccttgaaggaatcgttgaagccaacttacaagaacgccgcgaaaccgctgaaaaagtcgagctgtttattgaagcggcaattgttgagtttaagcagtggcttaatacgctcggcgtcgtgccggtcatttcggcgctgcgtgaaaaggcgctgtccatccagtccgatacgatgcagagcattgagcgcaagctgcctcatctgacggtgagagagaaaaaacttctcagcaaacatacgaaaagcatcattaaccaaatgctgcgcgacccgattctgaaagcgaaagagcttgcggctgaagcggattcagatgaaaagctgaagctgtttatgcagattttcgatattgaggaagaggccggccgccagctggacaaaagcctggataaccgccagacggttcattcgtttcaaaaggcagaagcaaaaacgggcttacgtccgcttgtaagtgagtgagggctgtatgattgatacagcaatggcaagacttaatgaagcgacaattgttatttatgcagtaagcgtccttttttactttatagattttcttcaacacaaccggaaggctggaaaaatagccttctggttgctttctattgtctggactctgcaaactgtctatctttcttatttcatgtggcagacgggcagatttccggtcttgaatattacagaggccctttacttttatgcgtgggtgcttgtcacgctttcacttgtggtcacgcagattctgcgggttgattttatcgtgtttttcacgaatgtcatcggtttctcgatgattgcgatccatacgttttcaccgacggatcagcattcggccgccttttccggccagctggtctcagagcttttggtcattcatattacaatggcgattctgtcttacggcgctttttccctttcttttgtcttttcgcttctttatcagtttcaatattctttattaaagaagaaaaaatggggaaaatggctgttgagaattgaagatttgtcaaaacttgattatatggcttacgttttaaatgtcatcggggttccgatgctgctgttgagcctgatattaggcgtgatctgggcgtatgtgtcgctggaaacgctgtactggtttgactcaaaagtgctcggctcgtttattgtgctgcttttatacagctactatttatatatcagaatgattaaggaactgcaggggaaagtggcggcgttatggaattcagcatgttttctcgtgctgatgattaattacttcctgctcggaagcctgtcacaattccattggttcagttaacgcacgcgcccaaacagattcgggaggaaagaaaatgagaacgattaaggtaggttccagacggagcaaactggctatgacccagacaaaatgggtgattaacaaactgaaggaattgaatccttcctatgactttgaaatccgggagattgtcacaaaaggcgaccgcatcctcgatgttacactgtcaaaagtgggcggcaaaggtttgtttgtcaaagagattgaacaggcgctgctgcatcaggagattgatatggcggttcacagcatgaaagacatgcccgccgttttgcctgagggtcttgtcataggctgcataccgaaacgtgaggatccgcgtgatgcgctcatttcaaaagggcatcaaaagctggacggcataaaagaagggggcatcatcggcaccagcagtttaagaagaagcgcccagattcttgctgaacgccctgaccttacaattaagtggatcagaggcaatatcgatacgagacttcaaaagcttgaaacggaagattacgatgctattattttagcggctgcggggctttcgagaatgggctggaaagatgatgtcgtatcggaattcctcgaaccggaccgctgtctgcctgcggtcggccaaggcgctcttgccattgaatgcagagagtcggatgaagagcttttgaagctgtttgcgcaatttaccgatgagtatacgcagcgcacggtggcagccgaacgggctttcttacacgcgatggaaggcggctgccaagtgccgatagccgggtatgcgtccgtcaatgaccgggatgaggttgaattggtcggtcttgtcgcgtctccggacggaaagacgatttataaagaaacagcggcgggacatgatccggaagaaatcgggaaacgctgtgcggcgatgatgtctgaaaaaggagccaaagcactaatcgacagcgtgaaacaggagctcgaacaggatggcaaatgaccttcctttacaaggaaagaccgtgctcgtcacccggaacaaaagacaggcagcaccgtttcgaaaaaaagtggaggcgctcggcggaacggctgtttccgcctctctgatcgcttttcaggaagcgctcccggatgaatgtgcggacagtctgcgggaagacctttctgaaccgggctggcttgtgtttacaagcgtaaacggtgtccggttctttttttcctaccttgatcagcatggccttgcgcttccggaacggaaaaaaatcgcagccgtcggtgaaaagacagcgcgcgccctgaaagagcggggagcccggacggatgcgatgcctgacgagtatgtggcggaatgtctggctgatactttaaaacggcacgcatcagctgccgaacccgtttcattgataaagggcaatttatcacgcgatgtcataaaagcggagcttgagccgcttggctatcaaataagggaatgggtgttatacaataccattcaggatgaaaaaggcatggacgagctgagacgggctgcatcccgctctcattttgattttattacgtttaccagttcatcggcggtgcatacgtttatgcacgcggtcggagacggagaaaaagcgtgggaaaacagcggtgcgagctatatcagcatcggccctttgacagagaaagcgctcttggaatacgggatctcatcccatgtgcctgacacctatacgattgaaggcatgctggacgtcatgtgcagcatgtcgggaaaggatagataatgatgaatcaaacatttaacagacaccgccgtttgcgcgcgaacgctgcgatgagagatctagtaaaagaaacacgtcttcacccttcagattttatttacccgttatttgtcgttgaaggactcgaaggaaaaaaagaagttccttccatgccgggggtttatcatgtatcactcgatttgttaaaggatgaaatggctgagctgatatcgctcggcattaagtcggtcatcgttttcggtgtgccggaagaaaaagacgcctgcggaacccaggcttttcacgatcatggcattgtgcagaaagggattgctgaaattaaaaagcattatcctgaaatgatcgtcatcgctgatacatgtctctgtgaatacacggatcacggccattgcggggtcgtgaaagacggagtaatcctcaatgacgagtcgcttgagctgctggcgcagacagccgtcagccaggctaaagccggcgctgacatcatcgctccttcaaatatgatggacggttttgtcacagtgatcagggaagcgctcgacaaagaaggattcacgaatattccgatcatgtcttatgccgtgaaatattcaagtgaattctacggcccgttccgcgacgcggctgacagcacgccgcagttcggtgaccgaaaaacataccagatggatccggccaaccgcctggaagcgctacgtgaggctgaatcagacgcggcagaaggcgctgactttttaatcgtcaaaccgtctatgtcatacttagatattatgcgtgatgtgaaaaaccgccatcacctgccgctggtcgcatataatgtgagcggggagtattccatggtgaaagcggcagcccaaaacggctggattaaagaaaaagaaatggtgctggaaattttaacgggcatgaaacgtgcaggagccgatctgattatgacgtatcatgcaaaagacgcagcgaaatggcttgctgagtaacgatttcatttgacgggagctgaggcagatgagaagctatgaaaaatcaaaagccgcttttaaagaagcgcagaaactgatgccgggcggagtgaacagcccggtgcgcgcgtttaaatcagttgatatggacccgatctttatgcagcgcggcaaaggatcgaaaatttttgatattgacggcaatgaatatatcgactatgtgctgagctgggggccgctcattttgggccacacgaacgacagggtcgttgaaagcctgaaaaaagtagccgagaacgggacaagtttcggggcatctactgaagtggaaaacgaactggccaaattggtcattgaccgtgtaccgtctgttgaaatcgtgcggatggtcagctccggcacagaggcgacaatgagcgccctgcgtctggcaagaggatacaccggccgcaacaaaattttgaaatttgaaggctgttaccacggccatggtgattcgctgctgatcaaagcgggatccggagtggcgacactcggcctgccggacagcccgggcgtgccggaaggaatagcaatgaatacgattaccgttccatacaacgacttggaaagcgttgcactcgcattccgggagtacggtgaagatattgccggggtcattgttgaaccggtagcaggcaatatgggcgttgttccgccgcaggaaggctttttacaaggacttcgcgacattacggaacagtatggcgcgctgctcatttttgatgaggtcatgaccggttttcgcgtggattataactgcgcgcaagggtatttcggcgtgacgcctgacttaacgtgtctcggcaaagtcatcggcggcggtcttcctgtcggtgcgtatggcggaaaagctgacattatggaacgaatcgcgccgagcggtccgatctaccaggcgggaacattgtctggaaatccgcttgccatgacagcgggacttgagacgttacagcagctcacacctgaatcttaccaagaatttgtgaaaaaaggcgatatgcttgaagaaggcatttcaaaagcagctgcagcacacggcattccgcacacgtttaaccgggcggggtcaatgatcggcttctttttcaccaatgagcctgtcattaactatgaagcagccaaatcttctgatttaaagctgttcgccaagtattataaagggatggccgacgcaggcgtatttctgccgccgtctcaatttgaaggattgtttctctccactgcgcatacaatggaggatattgaaaataccattcaagccgctgagaaagtgttccaggcgatcagccgctgataccgaaaagccgatgcaagcaagacttgtatcggcttttttcaatgcctccattatcatattttcccggattgcggcatacacctttagtgacatctaattgtatggattagatgaaaggaggatatgaacttgccgcataatcaccgattgcaattttctgttgaagaatcaatctgtttccaaaaaggacaggaagtttctgaattactttcgatttcattagaccctgacatcagggtgcaggaagtaaatgattatgtctcaattaaaggatcattagaacttactggcgagtacaacatagatcacagcagtcattttgaagagcttgatagggagctgaggcatgtagaggaagtgagggcgagggaggatggcacggccgagctcattcattgtttcccggtggacatcacgattccgaaaaataaagtgagccacctcaatgatgttttcgtatttattgatgcctttgattatcagctgacggattcaaggatcttaaccattcaagctgatttggcaattgaagggctgcttgaggaatccgagccgaaagagccggagatccctttgtacgtggcgcctgaattttccagagaagaaatgatcaatcttgccggacatcattctgaggacgaaaatgaaccagaattaatgatacgccatgagcctgaaatacctttgactgtatcagaagaagcagcacaagaaacagagaagaacgaggaagaaatcccgcctttactcaggcaggaggaagaagagcaggaaacagccccgattctgagggagcgggaagaagaaaagcaggaaacagccccgattctgagggagcaggaagaagagcaggaaacagccccgattctgagagagcaggaagaagagcaggaagcagccccgcttctgagggagcaggaagaagagcaggaagcagccccgcttctgagagagcaggaagaagagcaggaagcagctccgattctgagggagcgggaagaagaagagcaggaagcaggcccgattctgagggagcgggaagaagaaaagcaggaaacagccccgattctgagggagcaggaagaagcgcaggaagcagctccgattttgagggagcgggaagaagaagagcaggaagcagccccggttttgagggagcaagaagaagaagagcaggaagcagccccgattctgagggagcaagaagaggtgcctaaacctgtttcctttactgagcctcctcctcccgtttccttccagcacgaagaagagccggaagaagctgaggagcctgcaatcatgtcagctgtgaggaatgaacccgtatttgaggatgattcagcagaagtgcaggaagagccgaaagatgatatcgaaccggttttccctgctttcactctgactccgcatgcagaaaaaccaaaaattgcggaacagcccttccttcaaaaagaagagcagccagaggccgagccgcttctccgtcagagcgatcataaggcggcagaagacgaagatgagcctgcggtttttcaagaggagcaggcgcccgtttatcgcgagttcgttccggaacggcaggaagaggagttttacagcgctcctaagctgcttgaagaagaggctcatggtgaagaagggtttgaaattgaggtaaggaagatggcgccgccggaggaggaaaccgggaagcctctcgatttgtcttttcagttttccaaactgccgcctgaggagccggcgcaagctgaacagcctgagccgcttaagcctgaaagaaagaatgaagaagcggcaccgggaaccgagcagaaggaaaatgacaactctcattacttgacaaaattatttacaagggaagaagaaaagttttcaagaatgaaaatttgtatcgtgcagcagcaagatacaatcgaccgggtgtgtgaacgatatgacattacatcccagcagctcatccgaacgaatgctttatcgtttgatgacgagcttgaggaaggtcagcttctgtatatacctgaatataataacagccatgtgtaagcacaaagaggccgtaaaaatgtggtgaatggaatggaagcagtccaatcagtgcttcaggaatacgggctggcggctgagtatattgagcctgtcagcccgcatgtttggaaggtctactcaaactacggcatttttgctttgaaacagctcaagccggcccgcagcagtgaatttacggatcttatgattgagattgaggagaaaggctaccgatcatttgtgccgatctgccgcacgtatgccggcgatttttttgcggggagacagacggagaattcttattatttaatgccttggcttcagtacgatcaggaggaagaacgggatcaaaaacatgtttacctttttaaagaggtcgcgaagctccattctgcgactgtgcgggacatccaaatccggactgaagatatcagcggcttttatgaagcaacgaaaagagattgggaaaatgataagcttgtctatgaacaattcgccgaccgggcggaaaaagagtggtacctttcaccttttgaactgcaggccgttacgtatcttacagaaacggtttccgccgtcaattttgctctggaacgtctggaagaatggtttgacgcggcaaaggatcatgacaagacgagagcggtgatcaaccacggcagtttatcgagccgccactttctgtataatgatgcgggatcgggctttttcacgaatttcgagaaagctgcgctgggccctccgcaaaatgacctgctcggcttttactccagaatgttcagaagctatccgaaagcatgtccggaatgtctggactggttttatacgtatcacaaatcattcccgctccgtgaagcggaaatcagtctgtttctcagctatatggcttatccgtccgccatgtacaaagtgctgaaacggtatcagaccggccaaaggggctctgaaaaagaagagtgcacgcaattattaagagcgttttggcagatgaaaaatgttgagccttttctcatgaaggttcatcagattgagcgggagaaaaaaataaaagcggaaaacgagtcctcttcataacaggactcgtttttttatatccattccaaatgcagggcgcacgctaaaaacagcaggatggcaagcagcaggacatcaaaagtcgtcggaaagaaaatcgtcctgatcccctgaaagatcgtaatcggaataatgacttgcacggatacaaggcggacctgtctggcccactgggggagcgaataagaattgaatttttttctcacgggcaattcctcctcacattcgcctttctatgtatcgtatgtaaggggaagagcggggtgcatgcccatttatgtatgacggcagcggtttttggaaaagatgattgacgaatcaaaaacacttttactataataaagaacataataaataagatcatgagctgatataaatacacctgctttgaacgggaagagtacaagaaagacgcatgaagagagagaagctactgtgctgaaaggcttcttatgccgtctcattggaaggtcgcccgggagcataatttcttgaacatacagtagagaaattcgggccgcacccgttatccgtttaagtgcatgaacaaatctgttcatgaaaaaaggtggtaccgcgaaagagcttttcgtcctttatcaggatgaaggctcttttttagttgctcagccatttctaaacatgctggagggttatcatggatacaaacgaacaaacaatgccgacaaaatatgatccgtctgcgattgaaaaaggccgctatgatttttggctgaaaggaaaatattttgaagcgggcggcgatcaaacgaaacagccgtattctgtcgtcattccgccgccgaacgtgacgggcaggctgcacctcggacatgcgtgggatacgacgctgcaagatatcgttacgcgtatgaaacgcatgcagggctatgacgtgctctggcttccgggcatggaccacgccggcatcgccactcaggcaaaagtcgaagcgaaactccgcgaacagggcacaagccgttatgacctcggccgtgaaaagtttttagaagaaacgtggaagtggaaagaagagtatgctgatttcatccgcagccaatgggccaagatgggactcggactcgattattcacgtgaacgtttcactcttgatgaagggctgaacaaagccgtgcgtgaagtattcgtcaagttgtacgagaaaggcttgatttacagaggcgaatatatcatcaactgggaccctgccacaaaaacggctttatccgatattgaagtgatttacaaagacgtacagggcgcgttttatcatttgcgctacccgttagcagacggttcaggctcaattgaaatcgcgaccacccgtccggaaacgatgcttggcgacacggctgtcgcggttcatcctgaagatgagcgctacaagcacttaatcggcaaaacggtgattctgccgattacaaaccgtgaaattccgattgtcggcgatgattatgttgatatggaattcggatcaggcgccgttaaaatcacgcctgcccatgacccgaatgactttgaactcggaaaccgccacaatttagagcggattctcgtcatgaatgaagacggaacaatgaatgaaaaagcgctgcaatataacggcatggaccggtttgaatgccgtaaaaaactcgtcaaagatcttcaggaatccggcgttctctttaaaatcgaagaccatatgcattctgtcggccacagtgagagaagcggcgccgttgttgagccgtacctgtccacacaatggtttgtcaaaatgcagccgctggccgatgctgcggttgaccttcaggcaaaagaagagaaggttcacttcgttcctgaccgtttcgagaaaacgtacctgcactggatggaaaacatccgtgattggtgtatttcccgtcagctgtggtggggccaccgcatcccggcttggtatcataaagaaacaaaagaagtgtacgtcggccttgaggcgcctgaggacagcgaaaattgggagcaggattcagacgtgcttgatacatggttcagctccgcgctttggccgttttctacaatgggctggcctgatgaaaacgctgaagactttaagcggtattactcaaccgatgtacttgtaacgggatatgacatcattttcttctgggtatcccggatgattttccaaggtcttgagtttaccggcgagcgtccgttcaaagacgtgctgattcacggcttaatccgtgacgagcagggcagaaaaatgagtaaatcccttgggaacggcgtggacccgatggatgtcatcgacaagtacggagcggattccctgcgctacttcctggcaaccggaagttcaccgggacaggatctccgtttcagctatgaaaaagtggaatccacatggaacttcgcaaataaaatttggaacgcctcccgttttgcattaatgaacatggacggcatgacgtatgacgagcttgatctgtccggtgaaaaatcagttgctgataagtggatcctcacaagactgaatgaaacgatagaagacgtgacacagcttgcggatcgttatgaattcggtgaagtcggacgccacctgtacaactttatctgggacgatgtgtgcgactggtatatcgaaatggcgaagcttccgctgtacggggaagatgaagcggcgaagaaaacaacccggtctgttctggcatacgtgcttgaccagacgatgcgtcttcttcacccgtttatgccattcttaacggaagaaatctggcagcaccttcctcatgaaggcgagtcaatcacgatcagctcttggccggttccggtgccggaacatacggataaagaggcagcggcggatatgaaactgctcgttgaattaatccgttctgtccgcaatatccggagcgaagtcaacacgccgatgagcaagcaggttgaactttacattaaaacatctaccgaagacattgccggccgccttgagaagaaccgttcttacgttgaacgctttacgaatccgagcacgctgaaaatcgggacggatatcgctgcggcagacaaagcgatgacagctgtcgtcaccggagcggaagtcattctgccgcttgaagggctgattaacattgatgaggagatcgcccgtctgcaaaaagaattcgacaagctgacaaaagaagtcgaacgcgttcagaaaaaactcggcaacgaaggattcattaaaaaagctcctgagcatgtcattgaagaagaacgcggaaaagagaaagactacacggcaaaacgcgaagctgtccggcagcggattgcagagctgaaaggctgataaaacagcggggcggtttcctaagaaaccgccttgtcgtataaaagaggggatttcattgtttaatacgtacaaagaagcgatcagctggattcacggcagactcaagttcggcgttaagccgggccttctccgtatggaaaagctgatggaaaaactggaacacccggaaaagaacattcgcgccattcatgtggcgggcacaaacggcaaaggatcaaccgtttcttttatccgttccgtccttcaagaagccggttatacggtcggcacgttcacatcgccttacatgattacgtttaatgagcgaatcagcgtcaacggcacgccgattaccgatgaggaatggagaacgctcgttaatgacataaaaccgatagtcgatgagcttgataagaccgatgccggaacggtgacggaatttgaaatcattacagcgtgtgcatttttatattttgcgaagcgggctgatatcgattttgtcatttttgaagcggggctcggcggcacatttgattcaaccaatattgtgaaaccgcttctgtcggtcattacaagtatcggacatgaccatatggccattttaggcaataccatcgaggagatcgccgggcagaaagccggtattattaaaaattccattccggtcattacgggcgtcaatcagccggaagcactcggcgttattgaagcggaagccgaaaaaaagcaggctccgtatcagtcactatataaaacgtgcagactgtttaatgaagcggcgcttccgtccggcgaaagcttttcgctggaaacagaaacgaaatgctatgaaaacattcaaacgtcgctgatcggcattcaccaaaggcagaatgcggcattggcgatattggccgctgaatggctgaatcgcctggaggccgcagtcatttcagaagaagcgatgcgaaacggactgggaaaatcttcctggccgggccggtttgaacgtcttcaaagccgccctttagtgtttgcggacggcgcccataacgaagagggtgttgaaacgctgacagaaacgatccggcagcgctttgccggtaaaaacgtccatgtcgtattcagcgcattaaaagacaaaccgtatcaggaaatgattaaaaagcttgaaaccgaagcggattccattcactttgtatcatttgactttccgcgtgcttcaagcgccgaagccctttacaatgcaagcagtcttgcatctaagagcttcgatgagaacccggacagtgtgaaagaatggatagaacaaaaagacggggcggatgatgtcatcatcattaccggctccttatattttatttcagagatgagaaagcggcttatctgacagcctctcggatgcccggcagaccattttccggttttgccgggtgtttttatgctgaaaatatattttcagccatttcagtcatggtgtttttctttgctataatctgagccagattgatagtaaaggtgtggtctgagtgcttttaattctgttttttctcggcttgattttcggttcttttttttatacagcagcgtgccgtatcccgctgcgaatctcggttatttcgccgcgttcatcctgttcgttttgccgcttgccgctctcctggggggagcttgtgcccgtcgtctcctatattctgcaaagaggcagatgcagaaactgccgtgcgaagctgtcggttatgtatccggcggcggaatgctggacggcgtgtttattcacggctgcaggcattcatttcggtttctcaaaagaactgttagtcgcgctgttatttctgtctctcctcatgattgttactatgacggatctgcaatatatgctgattcctgacaaagttctgctgttttttcttccgcttttcatcgccggccgaatgttttctccgctggattcatggtatgcagggtttgccggagccgtttgcggattttttctgcttgtttttatcatgtttgtcagtaaaggaggcatcggcgcaggtgatgtgaaactgtttggggtgatcggcctgacgctcggcgtgaagctcgtgctcattgcattctttctttccgttatgatcggagcggtatacggtatgtgcgctgcagcccggggcagtcttggtaaaaagcagccatttccgtttgcgccggccatctcagccgggagcgctttgagttatttatacggtgatgagctgttttcgttttacatcaagctcgcttcaggcggggcttgaaaaatttggcgaacgttttttggacaagacgacaaaagtcttgttcttttttttttcgcctatgctaaagtgtgaaccatgatcagttcaaggtacggccaagacgaatgcaagggggaagagacgttgaaaaaaaggaagagcaaaaagcacagcaaagctaaaaacaatgcccttaaagtaaccattaacggacaagaagaaacgatgtatggacaagaagatgtgaatgaaggcggggagaagaccgtcacattttccaattgggaagaaacaaaaaaggcggaacaggagaccgccgcttcccatgaagatccgaaagaagaagatttcaattgggatcatgagaagaattctgaggtatttgaagatgacccgaaagtcgttccgccataccagaagaaaaaaacaggccctcattttccgaaaaaaaagcagccgtcttctccagttaaaaaagcggtcacgacaattgccgttgcggctgttttaggcaccgggctcggccttgtcgccttaaatatgtcgggaagtaaagaagcctccgctccggcatcagctgacaaaggttcacaagggcagacggtgaaagcgggagatgtttctaacgacaaatctgaaacagccggcacaggagatgcggaatcttcagcgggaaactataaaacatatgcggtgcaggccggaaaattttcatcagaaaaaggagcgcaaacgcttgttgaccagctgactgaaaaaggatactcggccgtctctctggcaaaagaagacggatacacatacgtgatcgccgggcttgcagcggaaaaaagcttatcacagcaattgggtcagacactgatagaccatgattttgaggcttggggcggaaaagagctcagctttgcggtcgattcagggctggaagactcttttaaacaggcatctgagctctccgccaaagcgattaccggcaaaaatctttcaaaaacggaagtggctgaagcggcaaaagcggcagacggcgcagacgccgctgacaaaaagcagaaagaggccgtgcttcaagcgctgaaagaactggaaacgtcgggttcggaatccggctggaaagcccaaaaagagctattaagtgttgtaaaatagtatctcatttcccgtcatccggcgggattttttattttgtcatcaaaaagttatttttctgaaattgtggttgcccgtttgatttggtaggatagacaagtatctttttttcttaagcaaaccctgaaaggatgacaaccatgacaaaacgcttaatactcgcatcacaatctccgcgaagaaaagaactccttaatcttcttcagattccttacagcattattgcgagccgcacagaagaaaaattaaatcgaaacctttcgccggaagaaaacgtccaatgtttggccgagcaaaaagctagtgctgtattggccgaaaatcccgatgcagtcgttatcggggctgacacgatggtgtgcatagacggcgagtgcctcggcaaaccgcgtgacagggaagaagcggcacagatgctgcggaggctttccggccgaagccatcaagtcattacggcggtcagcattcagacgcgtgaccggaaagaaacattctgtgacacaacggaagtgacgttttggccgctcagtgaagacgacatacagctctacattgaaacaaaagaaccgatggataaagcaggtgcatacggcatccaaggaaaaggcgcgcttttagtgaaaaaaatagacggtgatttttattctgtcgtcgggcttcctgtcgctaaaacaatgagagccttgaaagaatttaatataaaagcttgatgttcaaaccgggaaggggaacaaggaggggttgatcatccgtgatctgccgttaaaattaagagatttccccgaaaaagaaaaaccgagagagcggcttctgcacttcggagccgaacatctctctaacaatgaattgctcgccatcctgctgcggacgggaacgaaacatgagtccgtcatgaacctcgctcaccggctgctgcggacgtttgacgggctgcgcctgttaaaaggcgcctctgcccaggagctttccagcattccgggaatcggaacggtgaaggccgttcagattcttgccgcaattgagctggggagccgcattcataagacatccgccggggagcattgcgtcatccgctctccggaagacggggcgaagtatgtgatggaggatatgcgctttttaacccaggagcattttgtctgtttatatttaaataccaaaaatcaagtcattcataaacgcaccgtttttatcggaagtctgaattcatctattgtccacccgcgggaggtgtttaaagaagctttcaaacgatccgccgcgtccttcatttgcgttcataatcatccttcaggagatcctacaccgagcagggaagatatagaggtaaccaggcggctttttgagtgcggaaatttaatcggcatcgagctgctggatcatttggtcattggtgataaaaaatttgtgagtttaaaggaaaaaggatatttgtaacactttttttttcgttgatttaagatataatagattttatgagtttttccctttagggtatttttgctttaagaaaggaagatacatacatatgttcggaattggtacaagagaccttggtatagatttgggaaccgcgaatacgcttgtgtttgttaaaggtaaaggaatcgtagtgagagagccgtctgtcgttgctctgcaaacggatacgaagtcaatcgttgcggtcggtaacgatgcgaaaaacatgatcggaagaactccgggcaacgtggttgcgctccgtccgatgaaagacggcgttatcgctgactatgaaacaactgcgacaatgatgaaatactacattaatcaggctgtgaaaaataaaggattgtttgcgagaaagccgtacgttatggtgtgtgtgccgtcaggtattacggccgttgaagaacgggcggtcatcgacgcgacaagacaagcgggcgcacgtgacgcttatccgattgaagaaccgtttgcggcagcaatcggtgcgaatcttccggtatgggagccgacgggcagcatggtcgttgatatcggcggcggaacaactgaagtggcgatcatttctttaggcggcattgtcacgtctcagtcaatccgcgtagccggtgacgaaatggacgactcaatcatcagctatatcagaaaaacatataatctgatgatcggtgaccgtacggcggaagccattaaaatggaaatcggttcagcagaaaccggtgaagaaaatgcgtcaatggaaatccgaggccgcgatcttctgacaggtctgccgaaaacgatcgaaatcacgggaacggaaattgcaaatgcactgcgtgatacagttctctcaatcgttgatgcggtgaagagcacgcttgaaaaaacaccgcctgagctggccgctgacattatggacagaggtattgtattaacagggggaggcgccctgctccgcaatctcgacaaagtcatcagcgacgaaacgaaaatgcctgttcttatcgctgaagatccgctggattgtgttgcgatcggcactggaaaagcactggagcacatccatcttttcaaaggaaaaacaagataatcaggagttaaatagaagaggtgtatcacgatgccgaacaaacggttaatgctattacttctgtgtattatcatattggtggctatgattggattctcgctgaagaacggccgtaataccacctggcctgaaaagctgatcggtgatacgacgggagtatttcaaaacatttttcacacgcctgccgaatattttgcagggttcttcggggacataaaagacctgaaaaacacgtacaaagaaaacgaacgcttaagacaaaagctggacggacagacacaatatgaagcgaagctccaagaactcaaagatgaaaacaagaagctgcgtgatgaactcgggcatgtcaaatcaatttccgactatgatccgattttagcgaccgttatcgccagaaaccctgatcaatggtacaagcagatcatgatcaataagggaacgaagcacaaagtggccaaagacatggctgtcacgaacgaaaagggtgcgctggtcgggaagatcaaaagcagcggactcaacagtttcacatccgccgttcagctgctgagcgatgttgaccgcaataacagagtggccaccaaaatctccggcaaaaagggaagcaaaggctacggtttaattgaagggtatgataaaaagaaacagaccctgaaaatgaccatccttgaaccggatgaaaaacgtgaagtgaaaaaaggcgacctcgtggagacctccggaacgggcggcgtatttcctcaagggctgacggtcggcgaagtgaccgatgtagaatcagatgcttacggcctgacgaaaatcgcttatgtgaaaccggctgccgacttgtacgatcttgaccatgtcatcgtcgtgaaccgaagcgtagcaacaggggaggaaggatcgtgaaacgtttccttctccctttgattatgattttggtcttttgtgcggaaagcatctataccgatctggtgcgttttcctttcgtttccgtcgagcagcaggtcgttccgcattttcttttgcttgcgctgatttttatgtcggcttatatcaaccaaaagcatgcggtgatctacggtttcattttcggatttctttatgacatcaattatacgggtgttttaggcgtttatatgtttggttttgccggattatgctatctggcggccaaagcgtttaaagtgctgcagacaaacgccctgatggtcattctggtcgcggtgctgagcgtatgtgtgcttgaattttacgtctacggcattcagacgttaatccgcagcggcactatgacgtttaacgattttgtcattcagcgattcttgccgaccgctttgctgaatatcgcgggagccgttatattagtcctgcccttcaggctgttttatataagtctgaagaaagaattaagagatgagtaaaaaggattttatctttttttgacgaaaagagtatgttgttgaggtgaacattgatgaagaccaaaaagcagcaatatgtaacaataaaaggaacaaaaaacggcttaacattgcatctggatgatgcgtgttcttttgatgagctcctcgatggtcttcaaaacatgctgtcgattgaacaatatactgatggcaaaggccaaaaaatcagtgttcatattaaactcgggcatcggtatctgtatcaggaacaggcagagcagctgactgatctgatcgcgtcaaagaaagatttagtcgtgcattcaattgacagtgaagtcatcgccaaagaagaagcgcagcggatgaaagaggagcaggaaattgtttcggtttccaaaatcgtccgttcgggccaggtgcttcacgtgacgggagatttgcttttaatcggagatgtgaatcccggcggtacgatcagagccggaggaaatatatttgttctcggttcattaaaagggattgcccacgcgggttataacggaaataaccgggctgtgatcgccgcatccgaaatgatgccgacacaattgaggatcaatcacgtgttaaatcgctccccagaccacattcaaaaagggaacgacatggaatgtgcttatttagatactgacggaaatatggtcattgaacgccttcagcaattggctcatttaagacctgatctaacaaggcttgagggaggaatgtgaaattgggtgaggctatcgtaataacttcgggaaaaggcggagtaggtaaaacaacaacatctgcaaacctcggtaccgccttagccattttagggaagcgcgtctgtttggtagacacagatatcggactgcgcaaccttgatgtcgtaatgggtcttgaaaacagaattatttacgacttagtagatgtaattgaaggccgatgcaagacgcatcaggcgcttgtcaaagacaaacgttttgatgatctgcttcatttaatgccggctgcccagacaagcgacaagacggctgttgtccctgagcagatcaaatcgcttgtgcaggagcttaagcaggaatttgattatgtcattattgattgtccggcgggaattgaacaaggctataaaaatgccgtctccggagctgataaggcgattgttgtgacgacgccggaaatatcagcggtgcgggacgctgaccgcattatcggacttttggagcaggaagatatcgaaccgccgcgccttatcgtgaaccgtatcagaaatcacctggtgaaaaacggtgacacgatggatgtggatgaggttgttcatcatctgtctattgatctcctcggaatcgttgctgacgatgatgaagtgatcagggcttcaaatatcggcgaaccgattgccatgaattccaaaaaccgcgccagcattgcgtaccgcaatatcgcccggcgcattttaggagaatccgttcctttgcaggtgcttgaagagcagcaaaaagggatgatggcgaaaatcaagtcatttttcggcgtgcgttcataatatataccagaatacaaagatctgatgaagcccagcttatcaggtcttttttgttttttaagagcgcatatttgcaatggacaagacataggatgtacaaacccaacgattgcaaaggatgatggcgatgagtcacagagctgatgaaattagaaaaagactggccaaaagaagaaaacagcggcctgaatcaaaacggactttcgttcaaaacgctcaaacgcagaattttcccgcgtggcagacggtcaaggagcaggaaaagcacaagcttcttccggactacgaatatcaaacggaacacccgcccgaatttaacgggcggcatccattgatcagcgctcattctattattttaaaatgcctgctggccgcctgtctcgtactgatctccgctattgcctataaaactgacaaacagccgctgagtcagatcaaaccggcaatcgcacaaacctttcaaaaagaatttcagtttgctgccgtaagcaattggttcgtatcttccttcggaaacccgctcgcttttcttacgccgggaacgaaaaagaaggacggtcaggtggcggtcagtcaggatatggccgttcctgccgcggggaaaatccagcaggactttcaaaataacggagagggcgtcgtcgtcgaaaccgccagtgaagccattgacagcgtaaaagaaggctacattatggaagtgagcaaagataaaaaaacagggctgacggtgaaggtgcagcacgccgacaatacaagcagcatttacggccggctgaaagatgttaacgtttcattgtacgattttgtcgataaagggaaaaagatcggttcgatcaagctcaacgataaaagtaaaggccagtactatttcgcgatccaggatggcgataaattcatagatccgatccaggtgatcacatttgatgaataaatggctcatcctcctttttaaaattcatgtccatccttttctttggattatcatggggctcggtcttatgacggggcacatcaaagcgctgctgtgtcttttgctggtcgtatccgttcatgagctggggcatgctgctctggctgtgtttttttcgtggcgcattaaacgcatctttctgctccctttcggcgggacggttgaggtggaggagcacggaaaccggccgcttaaagaggaattcgcggtcattttggcgggcccgcttcagcatgtgtggcttcaggcggcagcctggctctttttcacgtcaggttttgcaagtgagcagacatttgagatgtttaccttttataacctctccattcttttcatcaatcttttgccgatctggccgcttgacggcggcaagttcgtgtttttatacttctctaaacaaatggcttttcaaaaagcgcatctcctcagcctgcagacatcggccgtttccgcgcttttgctctgctgctggattgtgctggccgtcccccttcaggtcagcgcatgggtgctgttcgtctttctcgccgcttctttatgggatgaataccggaagcggcattatattcagctgaggtttcttttggagagatactacggcaaaaaccgcgatgtcgccatgctgcatcctttgacggtcgcggccgatgccaaagtaaagcatgtcatggctgaattcaaacggggatgcaagcaccccattatcattgaaaaagccggcgaaaagctcagccagctcgatgaaaatgaagtgcttcatgcgtattttgccgataaacggacagattcctctatggaagacctgctgctgccttactagaaatagattgacatatccttttggttctgatatattttttaatgttatggatgtagcaccaatgctacaaccgctcgggacaggtgataagagctttaaagccccctgttgctggcgagtcttagtctaataggaggtgcagagaatgtacgcaatcattaaaacaggcggaaaacaaatcaaagttgaagaaggtcaaactgtttacatcgaaaaacttgctgctgaagcaggtgaaacagtgacgtttgaagacgtattgtttgttggcggagacagcgtgaaagtcggcaacccaacagttgcaggcgcgacagttacagctaaagttgaaaaacaaggccgtgcgaaaaaaatcactgttttccgttacaagccaaagaaaaatgttcataaaaaacaaggtcatcgtcagccttatactaaattgacaatcgaaaaaatcaacgcgtaagcatgattgaggcaacaattcgaagatcccggaatgacgggggcattttgtcctttgaaatgacgggacatgccgattttgctgaacatggacgagatctcgtttgcgccggggtcacggctgtcgttttcggagcggtcaatgcggttatcgcgctggctcctctcgaaccgattcttgatataggcgaggacgggggttatttctattttgaattccctgaagccgctgatcaggaagctttgcaaaaagcgcagctgctgattgaaggcatgattgtttctcttgaaacgatcgagcgggattacagtgaacacttacggttgactgcaaaccaaatataggaggtgagttacatgcttagattagatcttcagtttttcgcttctaaaaaaggtgtaggttctacaaagaacggacgtgactctgaatctaaacgtttaggcgctaaacgtgcagacggtcaattcgtaacaggcggatctatcctttaccgtcaacgcggaacgaaaatctacccaggtgaaaacgtgggccgcggaggagatgacactctttttgctaaaatcgacggaactgttaaattcgaacgtttcggccgtgaccgcaaaaaagtgagcgtatatcctgtagctcaataatgacacaaaaaactccggtcgttgactggagttttttttgcagtaagcggagtaacatcaagaatgaaaagcagaggatgcgtgagtgaaccccgccttgaatgaggacatcagcttctcatacccactggatatgttccccaagcagtgataccaaaaatgtttctgcctggcatccgcattgtatgcgatccgaaaaaggaacatgatgaaccaggaaaaacaagtgtttttttaacaaagccttctctgttataattcatagtacacacttatcaagactcctaaaaagaaattaaacgattgggagtgcgaaaatgaaggatgtatcgaagaaacaagaagaacctgtaagcgatgcggctctgatcaatgaactgatccaattaatgggccatttccgtcatgattggatgaataagctgcagctgataaaaggaaacttaagtttgcagaagtatgacagggtcgttgaaataatcgacgaaatggtcatagatgcaaagcacgagtcaaagctctcaaacctgaaaaccccgcacttggcgtttgactttctgacatttaattggaagtcccgttatatgaggctcgaatacgaagtgctcggagaaattaaagatttatcggcatatgatcaaaagctgtcgaacctgatgagaaaactgtttcatctgttcggtctggcggtaagcaatgaaagtgaaaatcatctgaccgtatcgctgcagacggatcaccctgacagacagcttattgtatatctcgattttcatggaacgattgcaaatgcagatgtgtttgatgaatttcgcaaatcccggtatgaggactttgatgtcatgcaatttgagctgaccggccatgaatgtgtggccgaaattggaatgaactagcggttttttacggtttagaacggaggatattatgtttgtagatcaggtgaaagtatatgtaaaaggcggcgacggcggtaacggaatggttgcgttccgccgtgaaaaatatgtgccgaaaggcgggcctgccggcggtgacggaggtaatggaggcgacgtcgtttttgaggttgatgaaggactgcgcacgctcatggacttccggtaccagcgccatttcaaagcgatacgcggcgagcacggcatgtctaaaaaccagcacggcagaaatgcggacgatatggttgttaaagttccgcccggcacagtcgtaacggatgacgatacaaaacaggtcattgccgatctgacagagcacgggcagcgcgccgtcatcgcaaaaggcggacgcggcggacgcggaaatacccgctttgcgaccccggccaacccggcgccgcagctgtcagaacacggagagcccggaaaagagcgctatatcgtgcttgaactgaaagtgcttgcagacgtaggtctcgtcggcttcccgagcgtcggaaaatctacgcttctgtctgtcgtttcatcagcaaagccgaaaatcgccgattatcattttacgacgcttgttccgaatctgggcatggtggaaacggatgacggaagaagcttcgtcatggcggatctgcccggtttgattgaaggagcgcacgaaggagtcggcttaggccaccaatttctccgccatatcgaacggacgcgcgtcatcgttcacgtcattgacatgtcagcgatggaaggccgtgatccgtatgaggattatgtgaccattaatcaggagctcagtgaatataatctgcggctgacggagcgtccgcaaattatcgttgcgaataaaatggacatgcccgaagcggctgaaaatctaaaagcgtttaaagaaaagcttcaggatgaccatcctgtcttcccgatcagcgcggtgacgagagaaggactccgcgatcttctgtttgaagtcgccaaccagctggaaacaacgcctgaattcccgctgtatgatgaagaagaactggcggaaaaccgtgtaatgtacacgatggaagatgaagaaattccatttgacattacccgtgatccggacggcgcgtttgtgctttcaggtgacagtctggaacgtctctttaaaatgactgacttctcccgtgacgaatccgtcaagcgttttgcaagacagatgcgcggtatgggcgttgatgaagcgctcagagaacgcggtgctaaagacggcgatatcatccggctgctggaatttgaatttgaatttattgattaaaaagacggagagcttgcaatgcaggctctctgatgtaaaagggaggggtgcaggtgaaagaagagacattttatttagtgcgtgaagacgttctgcctgatgcgatgcggaaaacccttgaagtcaaaaagctgctcgacagaaaaaaggctgaatcggttgcagatgccgtgcagaaagttgatttaagcagaagcgctttttacaaataccgagatgcggttttccctttttacacgatggttaaagaacaaataatcacacttttctttcatttggaggatcggtcaggcgcgttatcccagcttttgcaggcggtggctgactcaggaagcaacgtgctttccattcaccagacgattccgcttcagggcagggcgaatgtcacgctctcaatcagtacgtccgcaatggaagaaaacattcatacgttaatgaataaactgagaaaatttgattttatagaaaaagttgagatcttagggtcaggcgcgtaaggagagaagagacatgaaagtcggttatttagggccagaagccacatttacacatctagcagtcagttcctgctttcaaaacagcgtgacacaagcaccttatcaaacaataccggcatgcatggatgcggcggttgcgggagaagttgatcttgcatttgttcctttggaaaacgcgctggagggctcggttaacttaacgattgactacttgattcatgagcagcctcttgcgatcgtgggggaaatgacgctgccgattcaccagcatctgctcgttcacccttcgagagaaaatgagtggaaaaagcttgagaaaatttattctcattcccatgcgattgcgcaatgtcacaaatttcttcaccggcatttttcgtccgttccttatgagtatgcgaagtcaacaggtgcggctgccaagtatgtcagtgagcattcggaccttccgatcggcgtgattgcaaatgaaatggcggccgctacatacggattgagcatcgtgaagcgggatattcaggattatcaggacaaccacacgagatttgtcattctttcgcctgaaaaagacgtctcattcgaagtgaatgcgaaactgtcttcacggccgaaaacgacgatgatggtaacgcttccccaagatgaccaatcaggcgcgctgcacagggtgctgtccgctttttcatggagaaacctgaatttatcaaagatcgaatcgcgcccgaccaaaacgggtctcggcaactatttctttattattgatattgaacaggcgatggatcaggttctcattcccggtgccgttcaagagatggaagccctcggctgccgggtcaagcttctgggaacatatcaatcctattcgatataaaaaaagctccccttcagggggctttttttttaatcttttattaaaatacccgcgtcgtccagcgcttgacaggcttggtcaatccgctcttttgtcggggcgcttaacgtatggagatgcacgcctccggtcagctgtgaaaggtaagcggcatttgtcgagttaatgtgatccatgaattgtttgacttctttccgtgtgctgactcttatggcggcggttaaatcgccgtatacggggtgttcaataatgacgtcctttatggtgacgccttcatcgacaatgagttcaagctcttcttccgtccgctccgggccgtgcagacaggcgacaatccgttcggcgtttttttcgccgccggcattcatgctgatgtataaatagccttggctcgtcgcgataatcggttcgctttttgctttcaagagcgatatgtcctgcacgatcacctgtcttgaaacatttgcttttttggccaattcgcctcctgttaatggcgagccggcttctttcagccaatgaagcagcatgtcgcgtcttttcgccccagtaagcttcgttccttctgtcaaattgctgattctcctttcttttgctcccatagcgccgtaaatgtatgtatcagcatatcgagctgttcacatgttgtttcgtttccgaatgagatccggaaaaactgccgcgcttcccgttcggtttttctcagcgccttcatagctgaagaagggccgtggctgccggcggaacatgcgctcccggttgagatgcaaatatcgttacgattacattctaacataatatattgtccttcaaaggagtgaaaaaaacacccgacaatgtggggcaggcattcaccgccggtttcttcctctgaaaatgaaatggggaggccttgacgcctaatttggtcatacaaataattcctcagcctgtcagcatgctcacggtgttcctccatatgtttcactgcatactccgcagcagcggtaaaagcgccgatggccggcacattcaccgtaccgggcctgaacccgttttcatgcacggtatgcggataaaccggattccagctgacacccggccgaatgtaaacagccccggtgcctttcgggccgtatactttatgaccggagacggaaagggcgtcgattcccgcctgatccgcatcaatcggcagtttgccgaaactttgaacacaatcgcaatgcagtaaaatgtttctctggtgaagaaaagcggccagacgattcacaggctggatgaggccggtttctgaattggcgtgctgtatggaaacgagccccgtgtcaggacggatatgagccgccagtatgtcctcggttataaggccgttttcgtcgggatatatgatggtgacatcaattccccggtcagctaaaaacgccgcggcattatggatcgagtggtgttccattgcggtcgtaataaaatgttttttatgatcgggcagaccgtacagcaatgattggacggccaagatgttcgcttccgttccgccgcttgtaaagtgaatgccgtctgccgctccgccgatcaattttcctgcagaatgtctgcaatattccagcacgtccgccgctcttcctccggcgtcatgaaggctgctagcattgccgtatacctctgtgctgagatgctgaaagactttcgcggcttctttgcttaaaggcgttcccgccgcgtaatcaagataaatcatacagcccgtctcctatccgtttatgttaaaaaaagcttgagtttattttatcgttgtgtaaatataggtgtcaagacaggtgtaaatataatgggagggtgatgtatgtctgaaaaaacaattatcgtcattggtacggggacggcggcccttgcctgtgcttcctcatttcctccgtcataccaagtaaccgtcatcacaaagagaaacgtaacgaacagcaattcgtattatgctcaaggcgggattgctgtttcatacgcaaaagatgactcgatagaatcccatgtgaacgatacactgtatgcgggatgcggacacaatgacgtgacagccgtgcggcatttgctgcaaagcggacagagcatgataaacaggctgatagaaggccttttcccttttgatacgaagtcggacggaacgttttgtctcggcagggaaggcgctcattccaaaaggaggattctgcacgccgggggagatgcgaccggacggatgctggttgagtttctggttcggcagctgagggacggcattcggatcattgaacacgagacggttgttgatctgctgattgaacacgggcgatgcgcaggcgttgccgtaaaggatgcttcaggtgccgtttcttacagaagagcggattgtgtagtgcttgcttcaggcggctgcggcagtctgtaccaatatcacacaaatgattccgccataacgggagacggcatcgctcttgccttccgcgcgggagctgagatcacggatatggagttcacccagttccacccgaccctccttgtgaaaaacgggactgtttacggtctgatttctgaagcagtgagaggagaaggcggatatttagcagatcgcttcgggcgcaggatcatggctggcagacacgcgcttgaggatttggcgccccgggatgtggtttcacgggcgatttatgaagaaatgatgaaagaaaatcctgtttttataaattgcagccgaatagccgattttaacaaacgttttccgaccataacagaaatttgtcaaacagccggcgttgatcttgaaagcgggatccccatagcacccggaatgcattttttaatgggcggagtaaaagccgatacatgggggaaaacgtccgtgcctgatttgtacgccataggcgagaccgcctgcacaggcttgcacggggcgaaccgccttgcgagcaactcactgctggaagcgctggcaagcgggcaacgatgtgctgaacatatcattcaaacaccgttaaacggaagatataaaaaaaccccgaagaaaactgatgtcatcttacaagtgccggacacaacgattcatgtgcttcaagccaaaatgacaaccggagcgggtatcgtcagggaaaaagaaaacctgcaggcgctgacatcctggcttaacaacgtatctgtgcatcatataaatgtgaaggatatcacaatggaacaagcagagctatcctgcctatggaagactgcgcaacttgttgtcacctcagcccttattcgggaagaaagcagaggcgctcattttcgtactgattttcccgggacggagaaagattggcacggaaaacaaatcattcattcaacatctggaacggttatcagaaaaaacgaaaggattggggaactatggacattctgcagctgaaacaaatgctgactcatttttttcaggaagatatcggaacgggtgatgcgacgtcacaagcgattttttctgatcagcaatgtaaagcgcggatcatcgcaaaaacagacggcgtgtttgccggagaagacgttatccgtgaaggatggaagcttttacacgatgatatccgcatccgccctctgaaaaaagacggagaacggatgaaaaaaggagatgtgctcgctgaaatggaaggccgggcggcagctcttcttactggggagcgggtcattctgaatctcatacaaagaatgtcaggcattgcgacaatgacggacgaggctaaaaggcgtcttgatgatccgtccattaagctttgtgatacgagaaaaacgacaccggggctcagaatgctggaaaaatacgccgttcgggtcggaggcggctttaatcatcgcttcggcttatatgacggcatcatgattaaagataatcatattgccgcctgcggatcgataaaggcggccgtggagcgggcaagagaaacggcagggcagatgcttgcggtggaagtcgagatcgaatccgaacagcagctgctcgaggcaatagaagcgggcgcagacattattatgtttgacaactgtccgcctgagtccgtccggcgttttgcaggcatgacaccgggccatatcaaaacggaagcatccggaggcataacgctcgacacattgcccgcttataaagggacgggcgtccaatatatttcactcggatttctgactcattcagtaaaaagcgccgacatcagcatggatgttgaggctgcggaacagggggatttttaagatgtctatttttgacgtgttaactgcatcagccgaaatgatgccgagccattataaagacatgagcaccggagaaatggaaaagcgtgtcgccgccattaaacgggatttcggaaagcgcctgttcattccggggcatcactatcaaaaagacgaagtgatacaattcgccgatacggcaggtgactccctgcagcttgctcaagtggcagaaaaaaataaagaggcggaatatattgtgttttgcggcgtgcattttatggcggaaaccgctgatatgctgactgatgataaccaaaccgtcatattgcccgacatgcgcgccggatgctcgatggctgatatggcagatattcagcagacggacaaagcatggcaagagcttcaagaactgtacggtaacaccatcattccgttaacatatgttaactcgacggcggaaattaaagcattcgtcggtcggcacggtggagcgaccgtcacctcttcgaatgcccggagtgtgctgaaatgggcttttaaacaaaaagaaagaattttatttttgccggatcagcatttaggcagaaatacagcctatgacctcggcattccgctgacagaaatggctgtatgggacccggggcagaaccgattgcttactgaccatccggaaaacattaaagtcatcctttggaaaggacattgctccgtacacgaaaagtttacagcggaaaatatttttcagctgcggcagcgggattccggcatccgcattatcgttcatccggaatgttcgcgggaagtggtctcgctcagtgacgacagcgggtctaccaaatatattattgatacgattgaacaggcagaaccgggaagcaagtgggcgatcggcacggaaatgaatcttgttcagcgcctcattcactcgcacccggataaacagattgaatcattgaatcccgatatgtgtccgtgtctgacaatgaacagaatcgacctgccgcatttattgtggtcgcttgagcagcttgaaaaaggcgagccgaagggtgtcattaaagttccggaagcggttcggacagaagcgcttcgtgctttgaacagaatgctgagtcatacgtaatcataaaaatttcccctccttcccaaattttttatcatcatgcccagtccaccggcatatagtgtgaagaaacgtattgtaatgacaaatgtaccgttcacgttttgtgcataggaggggaaaacgttgaaaattcatatcgttcaaaaaggcgattcgctctggaaaatagctgaaaaatacggagttgatcttgaagagttaaaaaaactgaatcatcagcttagcaatccagacttaattatgcctggaatgaagataaaggtgccttcagaagccgttccggtcagaaaagaacccaaggccggcttcggaacgtctgcgcataagcatgagcatccatatgccaaagaaaaaccgaaatcagttgtggacattgaagacaccataccggaagaaccgaagccgtcaattccgtatgtgccgccaatccctgaaaagcatgaaaatgtgctgccggaagctgatatgaaccaatattatccgtccaatcagctgtttcagccgtggtcgcctcctaagccggaggaaccggtgacacattttgtcgagccgaaagaaaaagagcatgacaataacattccacaacaggaggaaatgatcaacatggaaaacgcgaattacccgaatatgccgaaggcgcctgaagccggaaagatggaagaagaaaacgccgcttatcatctgccgaacatgccaaacattccgaatgtcccgtttccgaatatgccggccgttgaaccgccttttatgcattacccgatgccgtgcatgccttgtccttgtccggttccggtgacaccgatgctgccgggttcgggactatgccatccgtgcttcccggtaggcggaggtttcggcggttttggaggaggttatggaggctttccggtaatgccgatgccgttaccgtacggattccatcatcacggattccatcatccgggatttgggccgcaagcgggttacggtgaatatgaaaaccaggcccatgaaaatgcagagcattatgatggttctgcatccggtttcggcggtgctccgtacggtcaaatgccgtattacggcggatattcgtctcattacgcaaacgcgcctcatcatgatgggaaatttaaggatgatgattgcggctgccatgattcacatcaccaccaccatcatcaccacggttcacatcaccatcacgcaaatatgcctgtgcagccgtatccgaatgtgggtgcaaacgccggatattttatgccttacggcggagcaaatcctaatgccgcaccgaatcagccgagtccaaatcaagtattcggacggccggaggaagaagaagattaatgtttcgggacgatgtatgtcgttcctttttttatgtccaactgaggaatggacataactgacaagcttaaacccgccgtcggccgcacatcctaaacatgagcggaaaacgctcaaacagcgatgaatccacgggggtttttccattgggtaaaaaactgatgacgatcgcaggcgttttagccgtgacggcaagcttaacggcatgcggagcaaataatgccatgaatgacggacgctacaatcagtcaacacgtccggtcggatattattcgaatgataatgataacggcagacgccagtacggaatggaccatcaaggacccgtttctgaaatgatggaaaaccgaaacggccgtcataatacgacaaacgtgtctgaccagtatgcgcctaatgacggggttccgttaacgacggacggcacatataacggccgaaatgtcaatacgccgccggcagctatgtcttataatgggtatgacaacgccgaaaacatcaggctggcggcaaaagttgcaaaccgcgtgaaaaaagtaaaaggcgtacaggatagtcaggtcatcgtgactgacacgagagtcgtcattgctgtcagaacaaatcatccttttacgaaaaatgatgataaacatgtcaaacatgcggccaaaagatttgcggacggccgtacaattcaagtgtttaccgacaacgctacttttacaaagctgcaagacatgaacagaaacagccgttaaacgggactgccggatgatttcatccggcagtatttttatggataaagcttcatcatttctttacatattcttaaaacgctctttatgttgcggtgttaacataaaagtaataaaacgtaacggaggggccggaatgaaaaaaacggagcatgacaaaagccgcggagaaaaaactgtgtatctgaccgtaaggggataccggctcaaactgacgtccggacaaatgaaactgatttcagccggccgggcataatcatcggggcagccttcataatagaggctgcttttattcggctgaaacagacaaatgaaagaaaacggttaagcaccggcatctttggtcaaactagcatcaagagtttgattgaataaagaggtgttattggtgaaacgaatttgcggtgctcgtctattgtttatgcttatcttatcggctgcagtcctgatttgcggaggaaaaggcgcatacggggcggaggttgagcattacgggccgcttcgggtgcacgtccagctggaaaaggtctatctggacggtgatgtcggcatcgaacatacggatgaaaccgttttggcgatggaggatttttgggccgcatatgcgggctggacgctcgttgagcagaaaaaaggcttcgttcttttccgtaagcatgttgatgacatttctccgctcagtaaggttaacggttatatcggcgtcacggacggaggcgtcatctccacttttcacggccgtcccggatcgctggccgagccgatccaatctttcttccagattgatatagaaaggctggaaagccgattgcaaaagcacttggaacacggcataccgtacaggacaaaagcggagtttgagagcgtgatcgatcatattaagacttacagcggatgactttgacgcaagacatgtgacacatgtcttttttttctgaatggaagatgtcaaagcgaacatacgttaacttttctataagactttggctgtttttgtgttacaatgataagcagtcaaagaggtgaataggtgtgattgaattcgtgaaggggacgattgattatgtatctccccaatacatcgtgattgaaaacggcggaatcggctatcaggtcttcactccgaacccgtttatttataaggtaagcaatcaagagaccatttttacgtatcatcatataaaagaagacgccttttctttgtacggtttttcaacccgggaagaaaaagcgcttttcacaaagctgctgaacgtcaccggcatcgggccgaaaggggcgctcgccatcctcggttccggtgaccccggagccgtcatcgaagcgatcgaacaggaagatgaagcctttttggtgaaatttccgggtgtgggcaaaaaaacggcgcggcagattattcttgatttgaaaggcaaactggccgacgtcgtgcctgaaatgattgacaacctgttcaatcatgaagcgcgcattgaaaaacaagaggctgaaacggcgcttgacgaggcgcttgaagcgcttagggttctcggctacgccgaaaaagaaattaaaaaagtgcttcctcacttaaaagaggaaacggcgctttcaacagatcaatatgtgaaaaaagcattgcaaaaattattaaagtaaggtgatgttcatggatgaacggctcgtttcaagtgaagcagacagccatgaatcaataatcgagcaaagcctcaggccgcagaatctcgcccagtatatcggccaaaagaaggtgaaagaaaatctgcgcgtgtttatcgatgcggcgaaaatgaggcaggaaacgctggaccacgttcttttatacgggcctccgggtctcgggaaaacaacgcttgcgtctatcgtggccaatgagatgggggtggagatgcggacgacgtcaggtcccgccatcgaaagaccgggagatttggcagccatcttgacggcgctcgaaccaggggatgtgctgtttatagacgaaattcacaggctgaaccgctcgattgaggaagtgctgtacccggcgatggaggatttctgccttgatatcgtcattggaaaaggcccgtccgcccgctccgtccgtctcgaccttcccccttttacgcttgtaggagcgacgacaagggtcggattattgaccgcaccgctcagagaccggttcggggtgctgtcgcgtcttgaatactatacgcaggaagagctgacagatatcgtgtcaagaacggctgacgtttttgaagtggatatcgaagaagctccggctctggagatcgccagacggtcaaggggaacgccgcgggttgcaaaccggcttctcagaagggtgagagattttgcccaggtgctcggcgacagccgcatcacggaagaaatcgctcacgacgcgctcgaacgtcttcaagtcgatgcgctcggccttgaccatatcgaccataagctgctgatgggcatgatcgaaaaattcagcggaggtcccgtcggccttgatacgatttccgcgacaatcggcgaagaaccgcatacaatagaggatgtgtacgaaccgtatctgctgcagatcggatttctccagaggacgccgaggggacgggtcgtgactccggctgtgtatgaacattttcgattggaggcgcccgcccgtgactgactttccgaaggttctcatggttctcggtgccgttttgcttattgccggcgcagtctggcactttgtcggaaggctgcccggagatattttcgttaagaagggaaatgttacatttttctttcccgttgtcacttgtattgtgatcagtgtgatactatccattctgcttaattttttcggcagaatgaaataacaatagacagaataaaggtgaaatgatgaaagtcgatttatttgattttgaactgcctgaacgcctcattgcccaagtgccgctgaaagaacgtgacgcatcgcggctgatggtgctcgacaaacagacgggcgggctgacggacagttcatttaaagagattgtaagcttttttaatgaaggggattgtctcgtcttgaacaatacccgtgtgctgcctgcaagattattcggcacaaaagaagatacgggagcgaaagtggagcttctgttattaaaacaggaagaaaatgatacatgggaaacgctcgtaaagccggcgaaacgcgtaaaaaaaggaacggtcctgacatttggcgacggccggctgacagcggtctgcacggaggagcttgatcacggaggcagaaaaatagaattccggtatgacgggattttttacgaagtgcttgaatcactcggtgaaatgccgctgcctccttatattaaagagcagcttgatgataaagaacggtatcagaccgtcttttcaaaagaaatcggatctgccgcagctccgacggccggacttcattttacggaagagattctggacgagctgaagcaaaagggtgtgcggattgaatttatcacacttcatgtgggactcggcacattccgcccggtcagtgcggatgatgtggaagagcataacatgcacgcggaattttatgaaatgacggaagaaaccgccgcctctttaaacgaggtcagaaaggcgggagggcgcatcgtgtcggtcgggacgacatcaacgcgcaccctggaaaccattgccggcgagcatgacggcgtatttaccgcttcaagcggctggacgtccatattcatttatccgggatatgaatttatagcgattgacggcatgatcaccaattttcatctgccgaaatcttcccttatcatgctcgtttctgcgcttgccggcagagagcatgttctttccgcctaccgtcatgcggtagaagaggaataccgtttcttcagctttggcgacgccatgctgattatctaatttgaagacaggaggcctcatacaaagtggctgaacaaccgatacgttatgaatttataaaggaatgcaaacaaacgggagcgcggctgggcagagttcatacgccccacggctcctttgagacgcctgtatttatgccggtcggcacgcttgctacggtaaagacgatgtctccggatgagctgaaatctatggatgcgggcattattttaagcaatacgtaccatttatggctccgcccgggacacgacattgtaaaagaagcgggcgggcttcataagtttatgaactgggaccgcgcgattttaacagattccggcggttttcaggtcttttcattgagcaagtttcgtaatatagaagaagaaggcgttcatttccgcaatcacttaaacggagacaagctgtttttatctccggaaaaagcgatggaaattcaaaacgccctcggctctgatatcatgatggcgtttgatgagtgtccgccgtatccggcagagtatgattacatgaaacgctctgtggaacggaccagccgctgggcggaacgctgcctggaggcgcacgggcgctcagatgagcaggggctgttcggaatcgtacagggcggagaatacgaagacctgcggacacaaagtgcaaaagacttggtttcgcttgattttccggggtatgccataggcggattatctgtcggcgagccgaagcacgtcatgaaccgagtgcttgagtttacaaccccgcttttaccgaaggacaagccgagatatttaatgggtgtgggttcaccggatgccttaattgacggcgccatccgcggcgtggatatgtttgactgcgtactgccgacccggattgcccgaaacggcacggtgtttacgaatgaagggcgtctgaatatgaaaaacgccaaatatgagcgtgatttccgtccgattgacgaagagtgcagctgccatacatgccaaaattactcccgcgcttacatcagacatttgatccgctgtaatgaaacgtttggaattcgattaacaacttaccataaccttcattttctgttacacttaatggagcaggtcagacaagccatccgggaggatcgtcttggtgatttccgagaagagttctttgagcgttacggctataataagccaaatgcgaaaagcttctaaataaaaccattcatgaaaggagggaaacagatgggtactttaggcacaatcgttcctattattttaatgtttgcagtgctttatttcctgctcatccgtccgcagcaaaagcagcagaaggccgtccgccagatgcaggaagagctgaaaaaaggggattcagtggtgacaatcggaggattgcacggcactgttgattcaattgatgaaagcaaggtcgtcattaaaacaggtgataacacccgtttaacatttgaccgccgcgcaatcagagaagcttccgctgaataacagcgaagctcatacatacaaaaaaagagcggagaatccgctctttttttattacgctgatctgcttcctttcaaattcactccgaaaatgccgcccagcatactgactcccaaaaagccgagatgaaacaaaagctgaccggatgtaaacgtttttccgaaccctaaatattgaaaaagcaagatgattaatgaaaaacagacggcggttaacgctccgatcatccagcctttttccttcgctttgccgcccgatataaaacctcccgcaaataaagaaagaaaagaaagcgcggtgatcagccagctgaaagatgattcttccattgaggtgactgtcagtaaaagcgaaatcgccaaactcgtaagaagcatcaccgcaaaaatagccactaagccgtacaaaacgcctcttcccacttgtttcgtttcttccatttttatctcctctccgctctgcggcctgatatatgacaagccggagcccgtctttttctaaatgtattctctgaatgttcgaattagacgtaaatgcatgatgttcagcccgtttcttacataattcagagccgatggcaaatgctatgaccgttggaggtgcgatatggaagatattttcattattacgtttcgtacgattgtgctttattttatcattcttgtgattttcagactgatgggaaaacgggaaatcggagaactgagcattttagaccttgtcgtctccattatgattgccgagattgccgtattggcaattgaaaatgtaaaagataagcttttgcatacaattgtgccgattgtcgttttaatgattattcaagtaagccttgcttttatttcgctcaaaagccaaaaaatacggcagctgcttgacggaaaacccaccattattataaaacagggaaaaattgatgaacgggcgatgagatcgcagcgctacaattttgacgatcttcttatgcagctgagggagaataacatcgatagaatctctgacgtatcgtatgccattttggagtcttcgggcaaactgtcaatcgtcaaaaagaaaaacaataaggataagcagatggaaacatcgcttatcgttgacggggtcattcagaacgagcatctggacagaatcgggaaagataaacactggcttgaaaaaaatttagcaaaaagaggatatcgcgatctttcggttatatcattctgcacgtttacggacggcgctttttttattgatctcaaagatgaaaaaggggagccataaatcggcttcaccgcgtcacgaacttgccgatgaccggaatccggatcagctcttcccttttaatcagcctgaataacagcagcagcgcaatgtacaaaatcgcggtcattgcaatccagcctgtgagattaacagcctctgatcctgaaaaatgaacggtgtgcttgatgatgcggctgacataaccgcaaatgaatatgacggcaaaacagagcgcgtattcttttattttaatgctgatcggaagcaccttgcttacggtggccgcatgcagcagggtgacaaggaccatccccgttacaatcgcaagtgcggcgcccatgatgcctaaggaaggcctggtcgccaaaacaaaaattaggccggttttgacagcggcgccgataaaactgttcatcatggcggccccggctaaattgagagcctgcagcaccgcctgaagaggcccctgaaaatagtaaagcagaaaaaacggcgccatcactttaacaaataccgccgcattagttgatccgtacatgacggacatcagttcatcagcgaaagagaataaaataaccaccgaaatgcctccgcttaaaagacacagcctcatcgcctgttccagacggtattctacaacttgcagctttttttgctccattccttcactgatcgcaggaacaagcgccgttgacagagaataggttataaagctgggcagcgtcaaaaccgtcatggcaaatccggtcagctccccgtactggctggtggcggcagcggtggccactcctgcaatcgcaaggctctgcgcgacgacaataggttcaaaaaaccaagataaatttccgatgaagcggcttccggttgtcgggagcgacacgctcatcagctggcggaaggtttcttttccatttgcaatcgacttgaaaaattgttttctgattctgattgttttatttgctttaaaacaaatgaataaataaataagagaggcaagctccccgatgacagacgaaatcatggctcctgctgcggcatattcaatcccgtacggcagaaacaccgtcgtgcagactgcgacaagtgaaatccgcacgatctgctcaagcacttgggaaaacgccagcgggttcatattctgcctgccctgaaagtaaccgcgcagcacgctggatatcgcgataatcggcacgacgggcgtaatcgccagaagcgggaaaaccgtgcgctgatccgtcagcatcgtttctgacataatcggcgcaaagcataaaaacagcggcgtgaagatgagacttaatatcccggtgacggtaagcgccatcactaaaatgtgtttcattttctgccggtccccccgcgcgcttgcttcagcgacaagtttgctgatggcaacggggaggccgaattgagtcaaagtggtggccaagaaaaatgtcggggcagccatcatgtataaaccgaccccttcttcaccgataaaccgggcgataaccacccggttgacaaagccgagcattctcgtaatcatcccggctgcaatgagaataagagtgccccttaaaaaagtctgttttgccattttataaacccctgccttctcaaactacctggaatcatatacaataaagatatgcgccgatgtcgtccgagcatgacaagtcttcgagaaaaatggaaaaaggagcgagcgcccagtggagaaacatcccgccgaaatgtacaaagatcatttgcggcctttcttgtacagtaaacttgaagagttcaaaatccttggatacgatgatgttgagcacgagagtttatggtcatacttaatacataaaaagtggaaacagaaaaaggaattgccgctgcatgaattggccggtaatattttatcagttaaaattggcgattttatgaactatgcaaccgttgaagcttttaagtcgtctaattggctggaaagcgatgagggtcaggaagctttggatgaactgctgagataatgatttgacggcataggtttaaggaggaaatacataatgaaaaaaggacgcttgattgcgtttttcctgatcgtattattgatcggcacagggctggggtattttacaaaaccggctgccaataatattacgttaggattggatttacgcggcgggtttgaagttctgtacgatgtgcagcccgtcaaaaaaggcgataaaatcacaaaagacgtgctcgtcagcacggtgcaggcgctgaaccgccgggctaacgttctcggcgtaagcgagccgaacattcagattgaaggaaataaccgcatacgcgttcagctggcgggcgtcacgaatcagaacagggcgcgcgaaattctgtcaacggaagcgcagctctcgttcagggatacgaatgataaagagctgttaaacggctctgatctcgtggaaaacggcgcgaagcaaacctttgatccgacgacgaacgaaccgattgtcagcgttaagctgaaggatgcggataagttcggagaagtgacgaaaaaagtcaagaaaatggcccctaataatcagcttgtgatctggcttgattaccaaaagggcgattcatttaaaaaagaagtcggcaaaaaacatccgaaatatgtatccgctccgaatgtgagccaggaattaaacacgaaggatgtcacgattgaaggtcagttcaccgttcaaaaagcgaaggacttggccaatattttaaacgcgggtgcgctgcctgtgaaactgaccgaaaaatactctacttcagtaggggcgcaattcggacagcaggctttgcatgatacggtagaggccggcatcatcggtattgcaattgttttcttatttatgctgctttattacagactgcctggactcatagcggtcattacgctttctgtatacgtgtatattacgcttcaagtgtttgactggatgcaggcggtgctgacgcttccgggtattgcggcgctcattttgggtgtcgggatggcggttgacgccaacatcatcacctatgaacggataaaagaagaactgaaactcggcaaatccgtccgctcagctttccgttcagggaacagacggtcatttgcgacgatctttgatgcgaacatcacaacgatcatcgcagcggtcgtgctctttattttcgggacaagctctgtaaaagggtttgcgacgatgctgattttgtcaatactgacaagctttattacagctgtcttcctttcaagattcctgctcgcccttcttgtggaaagcagatggcttgaccggaaaaaaagctggttcggcgtcaagaaaaaacatattatggacattcaaaaaacagatgaaaatactgaaccgcatacggcattccagaaatgggatttcacgagcaaacgaaaatatttctttattttctcaagcgctgtaaccattgcgggaattatcatcttactggtctttaaactcaacctgggaatcgattttgcaagcggtgcgcggattgacgtgcagagcaatcatgcattgacggcgcagcaggttgaaaaagactttgactctctcggcatggatccggaaaacatcgtactctcgggtaaagagaaccatgttgccgcggcccggtttgtcggagagccatccaaagaaaaaatcgctgaaatcaaaacgtactttaaggacaaatacggatctgaaccgaacgtcagcacggtatcgccgacagtcggaaaagaactggcccgtaatgctttatatgccgtggcaattgcatcaatcggcatcattatttacgtgtcaatccgtttcgagtacagaatggcaatcgccgcgattgtatccctgctgtatgacgctttctttatcgtcgcgtttttcagcattacaaggctggaggttgacgtaacctttatcgccgctattctcaccataatcggttactcgataaatgatacgatcgttacatttgaccggatacgcgagcagatgaaaaaacgcaagccgaagtcatttgccgatctggaacatatcgtgaatctgagtttgcagcaaacctttacacgttcgatcaatacggtcttgaccgttgtgattgtggtcgtcgtgctgctcattttgggctcatcgtcaattacaaacttctccgtcgctttattggtcggtttattgacgggcgtttattcctctctttacatcgccgcgcagctgtggcttgtatggaaaggaaaagaatttaaagggaaaaaatcaatcgaagagtaaaaggaaacaggctgtcttccggaaggcagcctgttttttttaggccgcattgaacttaaaacctgcatttgctataatgacatacgcttacataatcaatcatcattgttaaaacatgtagggggttcttatgaacgttcgtgagtcggagcttccgggcatcggccagaaagtagaagtcattacgaaaaatcacgataaaatcagtattattcttcatgatgacggcagaaaagagctctattacttcgatgagaatgattatgacgaatgcttggcatccgttgaatttaacgacgaagaggcgaggcagatttccgctattttaggcgggatgacgtataagccgaaagcgctggaatctgtggaagtcgcgcttgatgacctcgtcattgagtggtttaaagccgaatctcatgcaccggctgtcagccgcacaatcggagatttggagatcaagaaacattacaacgtccagattattgcgatcgtgaagaaaaaccggcaaaaacagctgagccccggcattgataccgtaattgaagaaggggacaccctcgttatatcgggagaaagaagcggactgaaaaagctggtccgcgagcaattaacggcccggatttcctgagaccggggtttactcccgggaaaatgggggaaaagataagaatcaataattgggggcagacgcatgaataaacaatggactattatattcgctttactatttactctgattgtcgccatctttgctgtcattaacgtgcgggcggttgaggttgattatctgttcggaaccgctgaatggccgctgattttagtcattttaggctctgtgttaatgggagcgctgatcgtgttttcagccggtatatttcaagtgatgaaactgaagcgcgaaattaaaatgctgcggaaagaaaacagatccgcaggtgaattgacggctgattcggacggcaaaaaaacagccgcgccgccggaagaaatgcttgaagagaaaaaaggatcagaataacatttgaaacccctcagtccgctctagtataatagggtggttgaggggtgaatttatgttagcgtcaaaaatgcgctgggaaatccagcagccggatcaggaaaaagtcaaatcactcacagaacaattggacataacacctcttgtggcatcactgcttgtaaaaagaggttttgatactgccgaaagcgcaaggctgtttttacatacaaaggatgcagacttttatgacccgtatgaattaaagggaatgcgggaagcagttgatcggataaaactggcggtttctcaaggggaaccgattatgatttacggagattacgatgcagacggcgttacaagcacgtcagtgatgctgacggcactcagacagctgtcggcggacgttgacttttatattcccgaccgttttacagaaggctacggcccgaatgaacaagctttccgttccataaaagagcggggattttcgctgatcattacagtggatacgggaatcgccgccgtccatgaagctgaagtcgcaaaagagctgggcttagacgtcattattaccgaccaccatgagccgggacccgagcttcctgacgtatttgcgatcatccacccgaagcagccgggatgcggctatccgtttaaagaattggccggcgtcggtgtggcgtttaagcttgcccacgcgcttacgggttctttgccggaagctatgctggacttggcggcaatcggtacggttgcagatctggtgcctcttcatgatgaaaacagattaattgcgtcactcggaattgaaaggcttcgtacgacaaatcggccgggcctcaaagctctgattaagctttccggcggagatatcggacaagctgatgaggaaacgatcggatttcaggtcgcaccgaggcttaatgccgtcggaagaatagaacaggccgatcccgctgtgcacctgctgatgaccgaagatcagtttgaagcggaggaactggcttcggatattgaccggctgaataaagagcggcagaaaatggtgaaaaccatgaccgaagaggctgttgaaatggtacagcagcaaggcggaaacccgtctgccattgtagtggcaaaagccggctggaatccgggtgtcgtcggtattgtcgcatcgaagctggctgaacgtttttaccggcccgctgttgtgcttgggatagatgaggagcagggaatcgccaaagggtcggcgcgaagcatcagaggcttcaacctttttacgagcctttcacagtgcagagacattcttcctcatttcggcgggcatccgatggcggccggaatgacgctgaaggctgaagatgtggcggaattaagggacaggctgaatcaaatggctgaagaaacccttacggaagaggattttattcccgttcaggaggttgatcttgtctgcggcgttgaagacataaccgttgaaagcattacagaattgaatatgctgtcgccgttcggcatgcttaaccctaaaccgcatgtgatggtgaaaaatgccgtgcttgatgatgtgcgcctgatcggagcgaataaaaaccacgtgaaaatgacggtgaaaagtgattccgccgtccttgactgcgtcggctttaacaaaggagagctggaagccggagttgttcccggatcaacgatttccattgtcggcgagatgtccattaatgaatggaacaacagaaagaagccccagctgatgattaaagatgctgcggtgccggaatggcagctttttgatattcgaggcaagcggacgtgggaagatacggtcaccgcactgccgaaggaaaaacgggtgctcatcagctttaacgaaaaaaccgctcagaagctccgtgaaaaagagctgacgggcgagcttgccgagatcacttcggaatccgaggcggaagctctccagcttgacggaaaatatgccgtttttctggatgtgccgccgtcagcggatcgcctgcagcatttgcttgacggaaagaagccggaacggatttattttgtttttatcaatcatgaagaacatttcctgtcctcatttccatcgcggaatgatttcaagtggttttacgcatttctcttgaaaaggggcgcttttgacttcggcaagcatggttcagagcttgcgagacacagaggatggtcaattgacacaatcaatttcatgacaaaggtgttttttgatctcggttttgttaaaatagaagatggtgtgctgtctgtcgtgagcggtgcgaaaaaacgcgacctggcagattcgcaaacctatcaggtaaaacagcagctgatggaattagaccagaagctcaattattccgcagcccatgagctgaaggaatggctgaataagctgatgaaccaaggttcagaggcttatgaaagtacgaggaggacatagaacagatggatcttaaaaaatacgtaacaattgtgcccgattacccgaaagaaggcgtacaatttaaagatattacgacattgatggacaaaggcgacgtataccgttacgccactgaccaaattgttgaatatgcaaaagaaaaagaaattgatttagttgtcgggcctgaagcgcgcggctttattatcggctgtccggttgcatacgcactcggagtcggctttgcgccggttcggaaagaaggaaaacttccgcgtgaggtcattaaagtcgattacggtttggagtacggaaaagacgtactgacgattcataaagatgcgatcctgccgggacagcgtgtgctgattactgatgacttgcttgcaacaggcggcacgatcgaagcaacgattaagctagtcgaagaactgggcggcgtcgtagccggtattgcgttcttaatcgagctttcttaccttgacggcagagacaagcttgacgattatgatattttaacattaatgaaatattaaccgcatatggaaaaaagcactcgtgtcagggtgcttttttcctattatttcatcatcctgacagattctttaggtgttttgaacttctgccctttacatctctcgtttttttcttgataataaactaatacagtttacatttaaaaaaggtgattccatggcgaacgaacaagtattgactgccgagcaagtaatagataaagcgcgcacttatctgccggaggagcagattgcgtttgttgagaaagcttacctgtatgcgcaaaacgcgcatcgcgaacagtaccgcaaatcaggtgagccgtacatcattcatccgattcaggtggcggggatcctcgtcgatttggaaatggacccttccacaattgcgggcggatttctgcatgatgtggtggaggacacggatgtcaccctcgacgacctgaaggaagtattttctgaagaagtggcgatgcttgtcgacggcgtgacgaagctcggtaaaattaagtataaatctcaagaggagcagcaggcggaaaaccatcgaaaaatgtttgtcgctatggctcaggatatcagagtcatattgatcaagctggcggatcgccttcacaatatgcggacgttaaagcatcttccgcaggaaaagcagcggagaatttcaaatgagacgttggagattttcgctccgctggcccatcggctcgggatttctaagatcaaatgggagctggaagacaccgctctccgttatttgaatcctcagcaatattacagaatcgtcaacctcatgaagaaaaagcgcgcggaacgcgaactttatgtcgaagaggttgtcaatgaagtgaaaaaacgcgttgaagaagtgaatattaaagcggacttttcaggacgtccgaagcacatctacagcatttaccgcaagatggcgctgcaaaataaacagttcaatgaaatatatgatctgctcgccgtccgtattcttgtcggaagcattaaagactgctacgccgtactcggcattattcatacgtgctggaagccgatgcctggcagattcaaagattatattgcgatgcctaagccgaatatgtatcagtctctgcatacgaccgtaatcgggcctaaaggcgatccgctggaagtgcagatcagaacgtttgagatgcatgagatcgctgaatacggggtggccgcacactgggcttataaagaaggcaaggctgcaaacgaagaagcgacatttgagaaaaaactgtcctggttccgtgaaattctggaattccaaaacgagtctacggatgcggaagaatttatggaatcgctgaaaatcgatctgttttctgacatggtatacgtatttacgccaaaaggcgatgtcattgaactgccgtcaggctctgtgccgattgatttttcctacaggatccactcagagatcggcaacaaaacaatcggggcgaaagtgaacggaaaaatggtgacgcttgaccataagctccggacgggcgacatcgtcgagattctgacgtccaagcattcttacggtccgagccaagactgggtcaaactggcgcagacgtcccaggcgaaacacaaaatacgccaattctttaagaaacagcgccgtgaagaaaatgtcgaaaaaggccgtgagcttgtcgagaaagaaattaaaaatcttgattttgaagtgaaagatgttttaacgctcgaaaatcttcaaaaagttgccgacaagttcaatttctcaaatgaagaggatatgtacgcggcggtcggatataacggcattaccgctcttcaggtggccaacaggctcaccgaaaaagaacggaagctgcgtgaccaggaagagcaggaaaaaatcgttcaggaagtcacttccgagccgaaacattatcctcaagggagaaaacgggaagcgggtgtgcgcgtaaaaggcattgacaaccttctcgtccgcttgtcgaaatgctgcaacccggtgccgggcgaccatatcgtcggttttattacaaaagggcgcggtgtatccgttcaccgggacgactgtccgaacgtcaaaacgaatgaagcgcaggaacgtctgattcccgttgaatgggagcatgaatcacaggttcaaagacgcaaagaatataacgttgagattgagattttggggtatgaccgtctcgggcttttaaatgaggtgctccaagccgtaaatgaaacgaaaaccaacatctcctctgtctccggcaaatccgaccgcaataaagtcgctacgattcatatggcgatttttattcaaaacattaaccatctgcacaaagtggtcgagcggattaagcagatcagagacatctattcagtccggcgggtaatgaactaaaaggagcttgctatgaaattagttgttcagcgtgtaacagaagcgagtgtgacggttgacggcgctgtcgccggccggatcggacccggtattatggcgcttgtcggcatcactcatgaagatacagaagaagatgccgcttacttggcggataaaatcgtgaatcttcggatatttgatgatgaaagcggcaagatgaatttatcgcttttggatacgggcggggagattttatccgtttcccagtttacgctttacggcgaaacaaagaaagggagacgcccgaattttatgaatgcggctaaaccggatcaggctgtgctcctttatgaaaagtggaacgaactccttcgggaaaaaggagtcaaagtggaaaccggaatattcggagccatgatggatgttcagctgacgaattccgggccgattacattgattatggattctaaacaataaaaaagctgccgttcggcagctttttttttatgattgaaaataatgttccaatccgctttcaattccgtctgtcactttttcctgataagagccgctatgtatgattgtttcttcttgcggttgactgagatagccgagctcatacagcatggcaggccgtttattttccctcaggacgtaataatcgccaaacagaacgccgcgatcaggaataggggaacgcttcactacttcagaatggacgtctgaggcaagctggcggtccttagacggactgtaataataagccgtgcttccccgcgttgacgtatcggcataactgtcatagtgaatgctgataaaggcatccgcattccggtaatgagaggttgaaaccctggcctgcaggctgataaatgtatcatcctgtctggtgatatacacgtttgcaccggccgctctcaattttccggctaacagcttagctgttttaatcgttacgtttttttcaaactttccggagtagccgatcgttccgctgtcttttcctccgtgtccgggatcaacgacgatcgttttgtttttaagtgagccgctgccgcctgacgtgttgggagaaggtgcttcgcctgtttcctcaccgctttttgacgtttgtacgacccagtctgccacatatgcggtttgtccgttttcaagccggacttcataccatttgccgcttgagccgacaatcgggtaggctgcgcctttatctgccctttttacgatagaagcggaagtcgaggccgagctccttaagttggtgccgccgtaaacaatatacgcttttttcgaggagcctgagcccgcagaaccgtctcccgagccggatgcgctgcccgatgagtcagaatcctttatgatgtagtggcttgctgcccagcctttttgcccgtttgcttcaattttcagccagccgtggtcttcacttaagatggaaacctttgttccgcgtgataatttagtcataatcgctgaatcatgtgacgctgcacttctgacattcaatgaagaaacgccgaccgtcccgctttttgacccgcttcgggccgaagttgctttcgtatccgatccgccgctgtccgcggtgacgtattcggaagaaacccacccggttgtgccttgataagaaatgttcacccatccgctgttcttgtccagcacggatgcatgcgcgccttgcggaagtttgccgatgacttcatacgatgtccccgggccttttctgatgcggaggtcaggatcggtggaagtgaccgttccgctttttgcggatgaattgtctgctcccccggctgtttttgatatcagccaggaaacgacccatccggttttaccggggctcagctgaagctgtacccagtctccctcttctttaacgatcgggtatctttcccctttttttacttcagcctttattccgtagctcaggccgggaccgcctctgacattgatcttgtctgtcgcgatgaccgcttctccctctgcggcgattgcggtgtgaaatgacggaagaagcgctgtgatgatgacgccgcataaaataagagcaagagttctcttcttcatggctgtcctcctttctgaactaactaaaatacattcttgtataatatcgtattttccttgctgaatgttaaataaaaataaaatggtttgtttatactagtcataaatacagcgaaaaggtgtgcaaatcatgaaatatcaaccaaaaatgggacgcgcgctgcacgatgcggaaggaaatctgcacttcagtgatcagagcgatagagaaaaggcgggttttcttgaagagacggcgacggagttcggtctcttatcgaaagaagcggtcgcaaggaaaaacagacggaataaaacttgacaggggagtgcaatcccattattataatagaaattgatgtacataactcatgataacgattttgaaccgataatggagaagagtaggtcagaatgcatggaaaagagaggaaccgtcccgggctgaaagcggatccgcactgcatctttctcgaaacaacactccggaggttccctgctgaacgcttttgcaagtcattaggcagcggacgtgaacctgcgttaaaggtcagagcggggatgcttcggcattccaactagggtggcaccacgggtataactctcgtccctactatacatgtatagtaggagcgggagtttttttatttgaagaaagacattaaggaggcctgtaacatggcatatcacattccaagaggcacacaggacatactgccgggtgaatcagacagatggcagttcgtcgaacaaattatgagggagacgtgccgcacttatcaatataaagaaatccgcacgccgatcttcgaacatacggaattattcgcaagaggcgtcggtgagtctacagatatcgtgcagaaagaaatgtacacgtttgaagaccgcaaagggagaagcttgacgcttcggccggaaggaacagccgccgcagtccgcgcgttcaatgaaaataaattatttgcgaacccggtgcagccgacgaagctttattatgtcggaccgatgttccgttacgaacgtccgcagacagggcgtttccgccaattttatcaattcggaattgaagcgatcggctccaaagatccggccgtggatgcagaagtcattgcgcttgcgatgagtatttaccgtaaagccggtttgaaacatgtcaagcttgtgctgaacagccttggtgaccaggagagccgcaaatcctaccgggaagcgctcgtcaaacattttgaaccgcgcatcggagaattttgctcagactgccagtcgcgtctgcacacaaacccgctcagaattcttgactgcaagaaagacagagagcatgaactgatgaaaacggctccgtccattcttgattacttaaatgaagaatcagccgcttattttgagaaagtaaaacaatacttaaacggtctcggcatcccgttcgaaatagatccgaaccttgtcagagggcttgattattataaccataccgcttttgaaattatgagcaatgccgaaggattcggagcgattacaacccttgccggcgggggccgctatgacgggcttgttgaacagatcggcggacctgaagcgccgggtatcggatttgcgatgagcatcgaacgactgctggcagccattgacgctgagaaaacagaccttcccgtcaatcaggggatcgactgctacatcgtgacgctcggagaaaaagcgaaggattattccgtttccctcgtgtacaaactgagagaagcgggcatctcaagtgaaatcgattatgaaaataaaaagatgaagggccaattcaaaacggctgaccgtctcggcgcacgttttattgcgattttaggggaagatgagcttgcccaaaataaaatcaatgtaaaagatgcggaaacaggagagcagcgtgaagtggtgttagacgagctgatacaagtgttaaaggcagatcaaaagcagtgaaggagaggaacgctatgtttggaagaacatattattgtggcgagataactgaaaaagcgattggcgaaaccgtcaaactgaaagggtgggtgcagaagcggcgcgatctcggcggcttgattttcattgatttgcgtgaccgctcgggtattgtgcaagtcgtgttcaaccctgacgtatcgaaggaagcccttgccgcagcggaagcaatcagaaacgaatatgtgcttgatatcgaaggcacggtttctgcccgtgaagaaggcacggtgaatcccaacctgaaaaccggtaaaattgaaatcaaagctgaagcggtgacggtgctcagtacggcgaaaacgcctccgtttccgatcagtgaccaggcggctgacgtttctgaagacgtccggttaaaacaccgctatttggatttgcgccgcccggcgatgtttcaaacattgcaaatgcggcatcaagtcacaaaatccatccgccatttcttggatgaaaacggatttcttgatattgaaacaccgattttaacaaaaagttctcccgaaggcgcccgtgattacttagtgccgagccgggtgcatgaaggggaattttacgcccttccgcaatcgccgcagatttttaaacagcttctgatggtgtcgggctttgaacggtattatcaagtggcccgctgcttccgcgatgaagacttgcgtgccgaccgccagccggaatttacgcagattgatattgaaatgtcctttatgagtcaagaggacatcatggctctggcggaagagatgatggcgaaagtcatgctcgaaacaaaaggcgttgaagtatcgcttccgcttccgcgaatgacatatgaagaagcgatgaacagctacggttccgacaaacccgatacccgcttcggcatgctgctgacggacgtgtcagacatagtgagagatactgaatttaaggtgttctcatcagccgtggcaaacggcggcgttgtaaaagcgatcaatgtcaaaggcgctgccggcgactattccagaaaagatatcgatgcgctcggcgtttttgccggaaattacggcgcgaaaggtctcgcttgggtgaaagtagaagctgacggcgtaaaaggcccgattgcgaaattctttgatgaagagaagcaggcaaaactggctgaagcgcttgatgcttctgaaggcgatctgctcctgttcggcgctgataagtttgaggttgtggctcaatccctcggcgcgcttcgcttaaagctcggcaaagaacgcggcctgattgacgaaagcctcttcaacttcctgtgggttgtggactggccgttattggagcatgacgaggaagaaggccgtttctatgcggctcaccatccgtttacaatgcctgtccgtgaagatcttgacctgattgaaacggcgcctgaagatatgaaagcgcaggcttacgacctcgtcttaaacggctatgaactcggcggaggctcaatccgtatttttgaaaaagacgttcaggaaaaaatgttcgggcttctcggctttacaaaagaagaagcggaggaggagttcggataccttcttgaagcctttgaatacggcgctcctccgcatggcggaatcgcgctcggcttagaccggttggttatgcttcttgcaggccgcactaacttaagagatacgatcgctttcccgaaaacggcaagcgcaagctgccttcttacggaagcgcccggcgaagtgagcgacgcccagcttgaagaacttcacctttctgtcaaaagaaaagtgaaacagtaaagatcggcagtttgtttcttgaaaatcaaaatctgctgtgatatgattttgacaagttaaataaagtcctgatgtgttagttgtacacctagttttgaccgaacatttttttgatttgggagcccgcatttttaaatggcgtacatgcctcttttcattcgctaaagaggacttacaagatttaaaaaagggcacccacctgctgagagcgggttcaaaacgaaggaaagctgcaacggcacaattgggactttattttttgtgcgctaaaaccagcggctttttgacaagccgagtttataaaaccagaatgtggagtgaggttcttgttacatcagttttccagaaatgagctagcgattggaaaagaagggctggacacgttaaaaaacagcacggtggccgttctcggcgtcggcggagtcggttcattcgcagccgaagcattggcgaggtccggagtggggcggatcgtgcttgtcgataaagatgatgttgacattacaaacgtaaaccgccagctgcatgcgctattgtcgacggtgggacagccgaaaacagaattgatgaaagagcggatcgctgatattaatccggattgtgacgtcgtcgccttaaaaatgttttatacagaagagacgtatgagcagttctttgagtatccgctcgattacgtcattgacgcgtcggatacgattcattataaaattcatctgatgaaagaatgtctgaaacggaatgttccgctgatttcaagcatgggagcagcgaataaaacagacccgacacgctttcagattgctgatatttcaaaaacccatactgatccgattgccaaagtcgtccgcacaaggcttcgtaaagagggcattaaaaaaggcgtacaggtcattttttctgatgaaagcccgatcgtcatccgtgaagacgtcagaaaagaagtcgggaatgatgaagcgaaaatccgcaaagcgcaaatgccgccgtcttccaacgcctgggttccgtcagtggccggtctgattatgggcggacatgttgtcatggagctcttaaaggacatcgacattaaacgggttaaagataagtaaaaagaaaaacagccttcttcaggaaaggctgtttttttatttgaatccgccgtttacacgaaagatcttgtccggttattttttctgcttcatcagtttttcatacacttgctttatggcggcttcaaatttccccgtttgtttcggtttatagtattgcttgttttttaacggatcgggcaaatattgctgttcgacccatccgttctcgaaatcgtggggatattgatagccgatcccgcgtccgagctcttgggcccctttatagtgggcgtcttttaaatgtttcggcacatcgccgattttacccgtcctgatgtctttgagcgcctcatcaacggctgaaatggcggagtttgatttcggtgagaggcataattcgattaccgcattggccagcggaattctcgcttccggaaagccgatccgttctgcggtctgaatcgcgctcagcacccggggcctgcctgcgggcttgcgaggccgatatcttcataggcgatcacgagaagccttcttgatatgctttcaaggtctccggcttcgatcagacgggccagataatgaagggcggcgtttgcgtccgagccccggatcgatttttggaacgcggataagacgtcataatgcgcatcgccgtttttatcatgggtatagctttttttctgcagacattcttccgccgtttcccgtgtaatccggatcgtcccgtcgcttgattcctttgtggagagcacggcaagctccagtgcgttcaaagcggagcggacgtctcctccgcacccttgtgcgaaatgatccatcgcgtcgtcgtccaccgaaacgctgtaggaaccgagtccccggtgttcatctgtgagcgctcttttcaatgcctgcctgatcagatcgggtgttaacggttcaagctcaaatatctgggtccggcttctgatggccgggttaatggcatgataagggttggcggtcgtcgcgccgattaaaataatcatgccgttttctaaatagggcagcagaaaatcctgctttcccttatcaagtctgtgcacttcatcaaggattaaaatgacctggcctgacattttcgcttcctgtacgacaatctccatgtcttttttattatgaatgacggcattcaatttcctgaatgcgatgcttgtcgatcctgcgatcgctgtggcgatggacgtttttccgatgcccggcggtccgtacaggatcatggatgataagtgcttcgcacgcaccattctgccgatgattttatcttctttgaccaaatgttcctgaccgataatgtcttcgatattggcaggccgcatccgatacgccaatggtttcatgaacatctctccttacatatacagggtaacggaaaacggacgattagaaaagcgaattgcggcgggccccgtgtttcaatgaaaattaggataagttatgttataataacagttggtctataagatactaaacagattattcatatccatttacttgtataaattaacaattagaattgactggggtgttcatattgaaaatatcgacaaagggaagatacgggctcaccattatgattgaattggcgaaaaagcacggagacggtccgacgtcgctcaaaagcatcgcccaaacaaacagcctttctgagcattacttggaacagcttgtatcaccgctcagaaacgccggactcgtaaaaagcatcagaggcgcttacgggggttacgtgctcgggggccagcctgaagagataacggccggagatattatcagagtgctggaagggccgatcagcccggtagaagtgcttgaggatgaagagcctgccaagcgggagttatggatccgcatccgcgacgctgtaaaagacgtgctggacagcacgacgttagaagaccttgcgagctacacggacggcgagcaggaagcttatatgttctatatttaaaccagaggtgtaaagacaatggaacggatttatttagatcatgctgcgacttcccccatggatgaacgtgtgctcgaagaaatgaagccccatttcttcggcagtttcggcaacccgtcaagcattcattcattcgggagagaatcccggaaatgggtcgatgaagcgagagcggacatcgcgcgcgaaatcagtgcgaaagaacaggaaattattttcacaagcggcggtacggaggctgataatttagccattttcggaacggctgccgcccggaagaatgaaggaaagcatatcattacgaccgctgttgagcatcatgctgtattgcacgcctgcgaaaagctggaagaagacggctttgaggtgacatacctcatgcccggcccttcaggacggatcagtgcaaatcaggtgaaagaagcgctccgtgatgatacaatccttgttaccgtcatgtatggcaataacgaagtcggaaccattcagccgattgacgaaatcggagagctgttaagcgggcatcaggcctattttcacacagatgccgtccaggcattcggttatatgccgattgatgtgaaaaaaagcagaattgacatgctgtctgtttccggtcacaagcttaacgggcctaaagggacaggctttttatatgtaaatcaagaggtgaagctgtcaccgattcttcttgggggagagcaggaacgaaagcgccgcgcggggacggaaaatgtaccgggcatcgccggcttaaaagaagcggtcgtcctttcaaaccgtgagagggaagagaaaacagcgaagtataaggagtttaagaacatcatcatgagcacgctggaagaagccggcgttacagcggaggtgaacggagatgccgagaaatgcctgcctcatattttaaacctttactttcccggtgtgccggtggaagcgctgctggtcaatcttgacatggaaggcattgccgtctccagcggatctgcttgtacggcgggatccgttcttccgtcccatgtgcttacggccatgttcggaagtgagagcggcaggctgacttcgtcaatccgcctcagcttcggcctcggcaatacggcggaacaaatcgaaacagccgccgaaaagcttgccgccgtcgttaaacggcttgcttaaaacggcggacttatgtttttaatggagtgaatgcaaatggaaaaacggccggaggatacaagagtcgtagtcggcatgtccggcggcgtggactcttccgtggcggcccttctgctgaaggagcagggctacgatgtaatcggaatctttatgaaaaactgggatgatacggacgaaaacggtttttgcacggcgacggaagattatgaagacgtcatccgggtctgcaaccagatcggaattccgtattatgccgtcaattttgagaagcaatattgggaaaaggtatttcaatatttccttgatgaatataaagccggaagaacccccaatccggatgtcatgtgcaataaagaaattaagtttaaggctttcttggatcatgctctgtcactcggcgcggattatcttgcgacgggccattacgcccgcgtggacagaagcgcagatacagtgcgcatgctccgcggtctggatgaaaacaaggaccagacttattttctgaatcagctcaatcaggaacagctcagtaaagtcatgttcccgatcggtgatctgcaaaaaagccgcgtgcgggaaattgccaaagaagcagaacttgcgacagctgcgaaaaaagacagcacgggaatctgctttatcggcgaacgcaacttcaaaacgtttctcagccaatatctccccgctcagccgggcgatatgatgacaatggacggagaaataaaagggcgtcatgacggtctgatgtattatacaatcggacagcgccacggtcttggaatcggcggaagcggcgagccgtggttcgccgtcggtaaagatcttgaaaaaaacattctgtatgttgatcaaggattccataatccgcttctgtattccgataagatcacggcgacaaatgtcagctggacgcgtcccggtctgatggacggcggcgaaatgacatgcacggcgaaattccgctaccgtcaggaagatcacaaagtaacggtgaaaatgacgggtgatgatgaagcggaaatcatttttgacgggcaggtacgcgccgttacgccgggacaagccgtcgttttttatgacggagaagagtgcctcggcggcggaacgatagatgacgtttataaagacggaacaaaactgtggtacgtataacacatgtaaaaaacctcaactcgcatgttggggttttttagcgaaaggaagttaaaaatggattataataaaatcgggattgacgccatgcaggagggcgattttgaaaaagcggcagaggcttttacgaaagcgattgaggaaaacggccaagacccggtgccgtacatcaacttcgcaaatctgctttcttctgtgaacgaactcgaacgggcgcttgcattctataacagagcgcttgaattggacaattcggcggcagccgcttattacggtgcgggaaacgtatatgtgatgaaagaatcgttttccgaagcgaaggatatgtttgaaaaagcgcttcgctccggaatggaaaacggagatttgttttatatgctggggaccgttctcgttaaattagagcggccgaagcttgcactgccgtatctgcagcgtgccgttgaattaaacgaaaatgacacggaagcgcgcttccagttcggaatgtgtcttgcaaatgaagaaatgctggatgaagctcttgcgcagtttgagacggtgatcgagcaggatccaggccacgcggacgcattttataatgccggggtcgcttacgcgtacaaagaaaatcgtgaaaaggcgcttgagatgctggaaggcgcaatcggcatacagcctgatcatatgcttgcgcttcatgcgaaacagcttatcacccagtcataacaaaaggagggaaggctcgtggatcagctgaacatcgaagaacagccgtatgtaaaaggcgtcattcatacggtcatttatcataatgacaccaacctgtatacagtgctgaaagtcaaggttgcagaaacgtctgaggcgatcgaagacaaggtcgtatccgtaacgggctacttccctctgctgcaagaagatgagacctacacattttacggaaaaactgccacgcatcctaagttcggcctgcaatttcaggctgaacactttaaaaaagaaattccgaccacaaaagaaggaatcattcactatttatcaagtgatctgtttgaaggaatcggaaaaaaaacggcggaagaaatcgtcaaaaagcttggagacggcgcgctcaataaaattctggctgatgcgtcggtgctttatgatgtgccgaaaatgtcaaaaaagaaagcggacaaactggcgggagagctgcagcggcatcaggggcttgaacagattatgatctctctgaaccaatacggtttcgggccccagctatccatgaaaatatatcaggcctacgaaacggaaaccttggagaaaattcaggaaaatccttatcagcttgtaaaagacgttgaaggcatcggctttgtgaaagctgacgagctgggcggaaaaatgggtctgtcaggaaaccacccggagcggatcaaagcggcaatcttatatacgattgaatcgacctgtctttcagagggccatacgtacatagagacaaagcagctgattatcaatacgcaaacgctcctgaatcagtcagctgaaggcggccgcgtcacggaaatggatgcggctgacggcatcatcgccctcggggagagtaaggatatcgtcatcgaaggagagcgctgctattttccctccttgttttacgcggaacaaaacgtcgcaaaacgcgtgctcgacattgcggctcagacggagtatgccgatcaatttcctgaatcggaatttctgcttgcactcggtgaactggaagaacggatgaatgttcaatacgcaccaagccaaaaggatgccattcaaaaagcgctgtcttcaccgatgcttttactgaccgggggacctggaacggggaaaacgaccgttattaaaggaatcgtggaattatacagtgaactgcacggcgtatcccttgaccccggtgattataaaaaagacgaggcgtttccggtgctgcttgccgcgccgaccggaagagccgcaaaacggatgagcgaatctacgggtctgccggctgttacgattcacaggctgctcggctggaatggcgctgaaggctttacctacaacgaagatcagccgattgaagggaaactgatcattatagacgaagcgagtatgcttgatatctggctcgccagccatttgtttaaggcgcttcctaagcacattcagctcattgttgtcggtgatgaagaccagcttccttcagtaggaccggggcaggtgctcagagatcttttggcttctgaagtgctgccgaccgtgcgcctgacagatatttaccgtcaggctgaaggatcatccattgtggaacttgcccatgatatgaaaaaaggactgcttccaaaggggctgaccgcgccgacaaaggaccgctcatttatccgctgtaattcttcacagattaaagaagtcgtggatcaggtcgtctcgaatgcgttaaaaaaggggtatacctccagagatattcaagtgcttgccccgatgtacaggggaaaagcgggaattaacgagctgaatatgcttcttcaggacatcatgaatccgcctaaagaaaaaaggcgggagctgaaattcggagatgtcgtctacaggacgggcgataaaatattgcagcttgtcaaccagccggaaaacaatgtgtttaacggcgatatcggcgaaatcgtgtccattttttatgccaaagaaaatacggaaaaagaagacatggtcgtcgtctcgtttgacggcaacgaaatcacctttacgaaaaaggatttcagccagtttacccacgcttactgctgttccattcataagtcgcaggggagcgaattcccgattgtcgtcctgcctgtcgtcaaaggctactatcgaatgctcaggagaaatctgctttataccgccattacaagagcgaaaaaatttctgattctttgcggagaagaagaagcgcttgaatggggcgtcaaaaacaatgatgccaccgtcagacagacgtcgcttaaaaacaggctcacagagcagactgaagagatggatgcagaactggccgccctgcaaaaagagctgccgttcagtgtatatgatgcgaacatcggaatggaaggcatcacgccttttgactttatggaagaaaaagcgtaaataaaacccggcacatgttcatgcgccgggttttcgcctgtggaagtcatttcaaagtatgctgcctggcttcttggcaaaacctatacgtgttcaacaaaaggtggttgatcacactttgagaacatgccatgcagctgaaggacgaacagtatatgacgaaaacaccgggcgcagtctcgggatgatatcggatgtatgtttctctctggacggccggtttctcggtttcgtgctggagcagaaacgcctgtttcacaaccgtcatctttttttaggggcaagtgatataaaagagatggatcaagaagccgtagctgccggtcatgctcatttgcagcctttgccgaagagctgtttcacctttgaacagattaaaatgcagccggtgaaatcgcctgatggtgaaatgttcggtttgctggaagatgtatacttttgtttggacaggggcataatcgtagcatatgaactctcggacggcttcttttcagatctggctggcagacgccaagtgcgccgcgccgccgatatgcttattgaagcggggaaagaaggcatcgtcctgaacggataagaggtgtagtctgtgcttgtatgtccgaactgcaaaagtaaagatatcggcaaaatcggcgtaaaccaatactattgctggggctgcttcattgagctgacggtggccaaaggcaaaattgcgacacatcaagtagaggaagacggcacgttaagcagtcttgatgatttgttttctgaagacgaacgcagtatcaatttttaaagttgaaaggagatacgcgcgatgggcagaacaatgacctctctgttggctttaggggctggagccgttatgtatcgtatggcttctcagtccgatatgctgaataaaaaaggtatgaaacggatgagaagacgagtcatgaaaatgttttaagcggaaaaaaggatacttctccggaagtatcctttttacgtttgtctcgcttccagccgtctggcagcgagagacaggctgtaattgaccgcgaaatacatcagggccgccagcagaaagatcgggaaaaaataccccccgtcagcgctttgtccgtttaaaatctgcgcgttatgaatcagttcgggcagagcgatgacgaccgcaagtgacgtatcctttaataaggagataaactggctcacaatcggaggaaccatacgcctgagcgcctgcggcatgacgacgagaaaaagagtctgcgtgtacgtcagtcctgaagaacgcgccgcttcaatctgtcctttgtcaacggattgcaaaccgcttctgatgatttctgacagcatggccgattcaaaaatcgtcagcgccgtgatggcggccgcggtaatttccagtttgatcccgatttccggaagggcaaaaaacgtaaagaaaatgattaataacagcggcaggttgcggatggtttccacaatggccgctataatgcccgagacgataggaatgttcgcatagcgcaaagtgccggcggcaagcccgaacataaaactcaggacaatggagatcagcgcaacataaagtgtgaccaaaaagccgtcccataaaaacagcagatggtcaggtgtataggcgccgctaaaatccatgttattcactctccttctctaataactttttccgagacgtctttccaaatagtgaaccccgatgctgagcgggatcgttaatatcaaataaaaaagcgcgacgaaaatatagacatcaaacacgacaagagtgctcgaggacacgagatccgcctgatacatcaaatcgagtcccgccaccactccgagtattgatgagtttttgacaaggttgagaaattggtttccgagcgggggaatgacgatttttacggcctgaggaagaatgatatatctcatcgcctgactgtaggtgaagcctgacgatctggccgcttccatctgccctttggggacagtctgaattccggctctgatggcttctgcgataaaggcggacgtgtaaatcgtaagcgcaatcgttcccgcctgaaagccgtccagtctcagcccggcgttcggaagtccgaaataaaaaacgaatgtgatgaggagaagcgggatgttacggataaattccacatacgcagtgccgatccattgaaggggtttgaaagccgtgattctcatgactgcgatcagaacgcccagcgcaaagctgcctgccagcgcgatgaagctcgcaagcaatgtgtgcaggaaaccgtccatatacatatcgaagttttccgttaaaattgaaaagttcatctatgtcactccttataaaacggggatgagcatgcatgctcatcccgcggtccgtcctattttgccggttcttcttttatccattttttatagattttttcgtacctgccgtcggctttcatttttttcaaagaggcgttgatttctttgacaaggccggattggcctttttgacggcgattccgtaaggttcatcggtaaaggtttcgcccgtcagctgatattgtttattttcatcggccatgccgtataaaatcgcattatcggttgtgagcgcatctccctgtcccgctttaagcgcagtgaacgcttcggcgtaattttcaaattccagcactgaggcgtcaggcgctttttctctgatgttctgtgaggaagtggagccttttaccgccaatacttttgagccttttcccaggtcttcggtgcttttgatgctgcttccttttttgacgagcagggattgcccggcttcaaaataaacatctgagaaatcaacttcttttttccgctcatccgttatcgtcatcgtggcggtgatggcgtcgatatcgccgttttgcagcatcggaatcctcgtttttgacgtcacttctttaaattccgctttcttctcatcccccagaatatcttttgcgagctgttttgagatatcaatatcgaagccttcaatatcaccggagcttgggtttttcagcccgaataacctcgtatcggttttgacgccgaagatgattttgtctctgtctttaatagaggctaacgtgtcttttcccgttccttttgaatccccggacgtttctttccctccgcaggctgccagcataaagacggccagcagtgatatcaatccgaatgacaaccattttgttgcgcgtgacataagcgctcctccgtttcttttcagtgatttaaaatacggcttaagaataaacgcgccctctcttcacgggggctttcgtaaaattcagccggtgcagcttcttctaagatggatccgccgtcgataaacacgatgcggtccgccacttcttttgcgaatcccatttcatgtgtgacgactgccatggtcatgccttcctttgcgagtgttttcatgacatccagcacttccccgatcatttccggatcaagcgcggatgtgggttcatcaaacagcataatttcgggcttcatcgcaagcccctggcgatggcgacacgctgctgctggccgccggaaagctgtgaaggataagcgtccgctttgtccggtataccgacttttttcaaatagtataaggccgtttcctttgcttcttcttttgattgcttgagcactttgatcggtgcgagcatgatgttttgcagaacggttttgtgcgggtacagatgaaaatgctgaaacaccatgccgatattccggcggacctgatttatatccgttttcttgtcacggatggagacgccgtttaccgttaaggcgcctccatcaactgtttccagctgattaatgcagcggagaagcgtgctttttcccgatcctgaaggtccgatgataacgacgacttccccttttttaatgtgcagattaatgtttttcagcacgtggaaatgtccgtagtgcttatttacatcctgaaatgaaatcatggccatcctccttaaaaaaacatgagtcatattgactggacagttttgaaatcctttaacacattacgatggttatacagacttttatgaatattatttagattatttcgtaatttctgataattatttccgtcaagaggtctgcgtcataaggcgtagtttatgaaacgggaataattccggctttctgtcaaaagataaagcaagaggtgaaacgtcatgcttcaaaaaccgctgcagctcttaatgtggacagctgtatgtctgctcgttttgttaacagtgtatgtcttttgcatgctcgatatgttatggtctcccatttggcttgttataaaatctctctttattcctatattcatcgcagtatttattgcttatcttttacttccgattactgaatggcttcatagaaaagggatgcctagaactttaagcctgcttctgatttattgcctgtttttcggcggaatcggctggggggtttataaaggggttcctgttttaattgaacagctgcaggatctgtctgagagcattcccggtcttgccgaaaactacaacagcatgctgaggcatctgcataatcacacggatcattggcctgacggcatgcaccatcggatggacaaaatgattcagcagacagaaacgtttcttgccggcacgattgaaagcacgatcagaagcatccgtttcgtgcttgattatatcctgatcgcggcgacgattccttttctcgtgttctatatggtgaaggatataggcgtcatgaaaaagacggtctggtatttgacgccgaagtcctggagaaaaagggggagtgaatttctgcgggatgtggacgactctctcggtgattacatccgcggtcagcttctcgtttgttttttgctcgggttaatagccggcgtttcattttggctcttcgggcttccttacccgctgattttgggccttgccatcgggattacgaatgtcatcccgtatttcggcccgtttatcggcgctgtgccggcgctgctcctttcgctggcgatttcctccaaggctgtgatcatcgtaatcgtcacgatttttattcttcaatttatagaaggaaacattttgagcccgctcattgtcgggcgaagtctcagaatgcaccccgtcgtgatcatgcttgcgcttcttgccggaggagagctcgcgggcattcccggcatgattctcgctgttccggcggcagccgttttaaaagtgacggccattcactttttgcggatcaggacggaacattgacattcgggttctgcttgtctataatttcgagtagaatacatacgaatctcgagtgacggataagagtacgccgaagccctgtttaagagagaagctccgatacgctgagaggagcttcagcagaagatcggccgaagctaatcctgagtgcagttaaaggctgccgcaatcctgcgttacgggatgaaaggtgacaggcctttttcggcctgtaatcagggtggtaccgcgagacagctctcgtccctgtgtgaacgcatggtttgcatagggagagagcttttttgctgtcgcaaaagagaatttcgggtagtgataaggaggaatatagatgaaacacttaacttctgctgaagtacgtcaaatgtttttagatttctttaaagaaaaaggtcatgccgttgaaccgagcgcctcattggttccgcatgaagatccgtctttactgtggatcaacagcggcgttgcgacgctgaaaaagtactttgacggccgcgttgtgccggagaatccgagaattgtaaacgcgcaaaaatcaatccgcacaaatgatattgaaaatgtggggaaaacggcgcgccaccacacgttctttgagatgctcggaaacttttccatcggtgattattttaaagaagaagccatcacgtgggcatgggagtttttaacgagcgaaaagtggatcggctttgatccggagctgctgtctgtaacggttcaccctgaggatgaagaagcttatacgctatgggcggaaaaaatcggcgttccggaagaaagaatcatccgtctggaagggaacttctgggatatcggcgaaggcccgagcggaccgaatacggaaattttctatgaccgcggcgagaaatacggtaatgacccgtcagattctgaattgtatccgggcggcgaaaatgaccgctatcttgaagtatggaacctggtattctcagagttcaaccacaacccggacggcacgtacacaccgcttccgaagaaaaacattgatacgggcatggggcttgaacggatggtctccgtgattcaggatgtcccgacaaactttgacactgatttgtttatgccgattattgaagcaacagagcgcatttccggagatgcttacggaaaggacgcaatgaaggatacggcctttaaagtgatcgccgatcatatcagaacggtcgcatttgcggtaagcgacggagctctgccgtcaaatgaagggcgcgggtatgtactgagacgcctcttgcgcagggcagtgcgatacgcgaaaaccatcggtatcagccgtccgtttatgtacgagctggtaccgactgttgcaggaattatggacgctttctatccggaggtgaaagaaaagcaagagtttatcgccaaagtcatcaaaacggaggaagagcgcttccacgaaacattaaacgaaggtctggccattttatctgacgtgataaagaaagagaaggaaaaaggcagcggcatcatctccggaaaagacgtattcaaactgtacgatacgtacggattcccggttgaattgacggaggaatacgcggaagatgagcaaatgaaggttgaccataaaggctttgaagccgaaatggaaaaacagcgtgaacgggcgagaaatgcgcgccaagatgtaggaagcatgcaggtgcagggcggcgcattgcgcgacattaccgcagaaagcacatttgtcggctacagtgccgtaaaagctgaagcgaaggtgatcgagcttcttcatgacgggcaattaatcagcgaggcgcatgaaggggataccgtccaaattcttcttgacaaaacgcctttctatgctgaaagcggcggacagatcggtgacagaggagtgctgagaagcgagcaggctgtcgtaaccattaaagacgtgaaaaaagctccgaacggccagcatgtacacgaaggcacggtggatagcggcacgattcaaaaaggcgcaagcgtgacggctgaagttgaagatcaaatgagaagcggtgtggtgaaaaaccatacagcaacccaccttctgcaccaggcgctgaaagacgttctcggcacacatgtcaaccaagcgggttcactcgttaccgaaaatcgtctgcgttttgacttctctcatttcggtcaagtgacgaaagaagaacttgaacgcattgaaggaatcgtcaacgaaaaaatctgggagagcattccggtagcgattgatttgaaaccgatcaatgaagcgaaagaaatgggcgcgatggccctgttcggcgagaaatacggcgatatcgtccgcgtcgtacaagtcggagattacagccttgagctttgcggcggatgccatgtcacgaatacggctgaaatcggtctgtttaaaatcgtatccgaatcagggatcggcgcaggtacgcgaagaatcgaagccgtaacaggaaaaggcgcttatcaggaaatgaacagccagctcagccttctgcagcacgctgcggatgagctgaaatcaaacgtaaaagacgtaccgaagcgaattcagtctcttcaagcggagctgaaggaagcgcaaagagaaaatgaatcattgctcagcaaacttggcaatgtggaagccggagccattctgtcaaaagtaaaagacatcggcggcgtaaaagtgctggctgaaaaagtaaatgcgaaagacatgaaccaccttcgtactatggtggatgatctgaaagcgaagctcggttctgcggtcatcattctcggcgccgtgcaaaacgagaaagtcaacctttcagcaggcgtgacgaaagacctgattgaaaaaggccttcacgccggcaaaatggtcaaacaagcggctgaagtctgcggaggcggaggcggaggccgtccggacatggcgcaggccggcggaaagcagcctgaaaaattggaagaggcgctcgcatctgcggaagattggataaaatccgttttataatcctttcaactagtgtagaatgatgataagatgaggacctcaggctgaactttgcctgcgaatttgggaaagaggtgcaaaacggtgagctcgtttgataaaacgatgaaatttaatttctccgatgattctgctgaaacaaacgtcgaagaagtgctgattacggtatatgatgcgcttcaggaaaaggggtacaatcctatcaaccagattgtcggatacttgctgtctggagatcctgcatacattcctaggcatcgcgacgcccggaacttaattcgcaaactggaacgtgacgaattaatcgaggaattggtaaaatcctatctagaacagcataaagaggcgtaaatacattcatgagaatattgggacttgatcttggaacgaaaacactcggcgtagctttaagcgatgaaatgggctggaccgctcagggcattgagacgataaaaataaacgaggctgaaggagattacggtctggaccgtttatccgagctgatgaaagactataatgtagagaagatcgtgctcggttttccgaaaaacatgaacgggacgatcggtccgagaggcgaagccagccaaacatttgcgaaactgcttgaaacagcgtacaatgtccctgttgtgctgtgggacgagcgtctgacgacgatggcggctgaaaaaatgctgatcgcggctgacgtcagcaggcaaaaacgaaaaaaagtcattgataaaatggcggctgtcatgatccttcaaggatatctggacagtttaaactaagaggtgaaagaaatggaacacggcgaaaaacatattacaattgtcgatgatcaaggcaacgaacagctttgcgaagtgctgttcacatttgaaaacgacacattcaacaaatcttacgtactttattatccgattgatgctcaagacgatgatgaaattgaaattcacgcttcaagcttcgaaccgaacgaaaacggtgaagacggcgaactgatgccgattgaaaccgatgaagagtgggaaatgatcgaagaaacgctgaacacgtttttagcggaagaagacgaagaataaaatgaacggaaaaagccggagcgcatatgcgcttcggcttttttttgtaataaattgccgaatgcacatgaatcatgtagtataagagctgttgggaggaaaatacttgtatgaatatcaatcagactaaaaattcatttccgcgtaaaaacaaaaaaacaacgataatactgtcctccgtgatcgctctgcttatcatcatttgcggtgcttttttctatggaaaatctctgctgtccccggttgacaaaggcagcaaaacggcagtcaatattaatattccgagcggttcttccgtttcggcaatcgctgaaattcttgaggatcagcatgtcatcaaaagcaaaaaagcatttcagctgtatgtgaagtataaaggcgcttccgggtttcaggcgggattttaccacctgaataaaggaatggatgcggatgcgattatcaaaaaactgaccgcgggatcaacgggatatgcctttcagatctccgttcctgaaggaaaacagcttacacagattgcggatgcgatcgcaaaagaaacatcatattcaaaagaagagatcatggcaaaactggatgacaaaacattcatcggcaaactgaaaaaacagtttcctgatacaataacggacgcactttcaaacaagaagctcaagcatccgctcgaaggctatctgtatccggccacatatccgtttaatgatccggatgcatcgcttgacacgattttgacggcaatggttcaggaaacaaatacccgtatcgaaacgtataaatctgaactggaaaaaaagaaactttccgtccataacgcgctgacgatggcatcgcttattgaagaagaagccaccgccaaagccgaccgtcacaaaatcgccagcgttttttacaacaggcttgcagaaaaaatgccgctgcagactgacccgacggtattatatgcggccggtaagcataaaagccgggtctactacaaagacctgaaaattgattctccgtttaatacgtataaacataaggggctgccgccgggaccgattgcaaatgccggtgattcatcatgggaagcggctctccgccctgacaaaacggattatctctatttccttgcaaaaccaaacggcgaggtcgttttcaccaaaacattaaaagaccataataaagcgaaggaaaagtatatttccaaaaaagacagcgaataaaaggagggcaaaagctctccttttattccattctgaaaggttttatgataaaatatatcgggttgtttacttatggataaagaagtgtcttaagagagtgtccccgcggattcgtcaggggcactcctttttagaacggaggctgtttgccgtgaatgatcggtatgaacaaataaacgagtatataaacgcgatgctgaagcctcggcctgataaagtgaaaaagcttgaagcctatgcaaaagagcaccatgttccgattatggaagaagcgggcattgaagtgctgcttcaaatgctgtcgattcaacaggcgaaaaacattttggaaatcggcgcggcaatcggatattccgccatacggatggcgcttgagcttccggatgcgaatatttacacgattgaacgggacgacaaacgctatgaagaagctgtgaacaatataaaagactttgaaatggaaaaccgggttcacgtaatgcacggggatgcgctggaactttctgagtctgtccgtgtcacggctccttatgatgccatttttatcgacgcggccaaaggccagtacacgaacttttttgagctctatgaaccgatgcttgcgccggatggagtcatttttacagacaatgttctgtttaaaggactggtggcacaaaatcactcggacattgagccgaaaagaagacggaagcttgttgaaaaaattgatcaatataaccaatggctgatgaaccggcctgactatcaaacggtcatactgccggtcggagacggcatcgccatcagtaaaaagaagaggtgaatgatcatgaaaaaacctgaacttttggtgactccgacttctgtacaggatattcttccgctcattcaagcgggcgcaacggccctgttagtcggagaacagagatacggcctgagactggccggtgaattttcaagagaagatataaaagaagccgtaaagacagctcatcaggaaggcgcgaaagtgtacgccgccgtcaatgctatttttcacaacgaaaaagtggacgagctgaacggctatcttgcctttttgcaggaggccggcgttgatgcggctgttttcggtgatccggccgttttaatggcggcgcgtgaagcggctcccgatcttaaactgcactggagcacggaaacaacgggtaccaactactattcctgcaattactggggacgcaaaggcgcacggcgggcagtgctggctaaggaattaaatatggacagcatcattgacataaaagaaaacgccgaagttgaaattgaaattcaaatccacggcatgacgtgcatgttccaatcaaagcgttctttagtgggccattacttcgaataccagggaaaagtcatggacatcgaacagaagaaaaaagaagcgggaatgtttctgcatgacaaggaacggggcaataaatacccgatttttgaagatgaaaacggcacgcacatcatgagcccgaacgatgtgtgcatgattgatgaattagaggacctgatggacgccggcatcgattctttcaaaatcgacggagttttgaagtctcctgaatacttaactgaagtgacccgcatgtacagagaagcaatcgatctgtgcttcgaaagccgagagacatacgaagagaaaaaagagagctggatagagcggattgaaagcattcagcctgtgaacagaagcatcgacacaggattcttctttaaagaaacggtctattaaaaaggagggtgcaacggatgacagccgtaaatcaaaccatttccaaagtcgtaaacggaaaacgcgtcattacgaaaaaacctgaactccttgctccggcaggaaaccttgaaaaattaaaaattgccgttcattacggagcggacgcggtttttatcggaggacaggaatacggactccgctcaaatgcggataacttctcaatagaagaaattgcagagggcgtagaatttgccaaaaaatacggggcaaaaatatatgtgacaacaaacattttcgcccataatgaaaatatggacggtctggaagaatacttaaaagcgttgggagacgcaaaagttgccggaattatcgtcgctgatccgctgattattgaaacatgccggagagtggccccggacgtagaaattcacctcagcacacagcagtccctttccaactggaaagcggtgcagttctggaaagaagaagggcttgaccgcgtggtgcttgcccgtgaaacgagcggactggaaattaaagaaatgaaggaaaaggtggacattgaaatcgaaacctttatccacggcgccatgtgtatcgcttattcaggacgatgcgtgctgagcaatcacatgacagcccgggattccaaccgcggcggctgctgtcagtcctgccgctgggattatgacctgtatcagacagacggtgcaaacgcggtcgcgctttatgacgaagaagacgctccgtttgcgatgagcccgaaagatttaaaattgattgaatccattccgcaaatgattgagatgggtatcgacagcctgaaaattgaaggccggatgaaatcgattcattacgttgcgacggttgtcagcgtgtatcgcaaagtcatcgacgcatactgcgctgatcctgaaaactttgtcattcaaaaagaatggctggatgagctggacaaatgtgcaaaccgggataccgcgcctgctttctttgaaggcacgcccgggtatgaagagcagatgttcggcgaacacggaaagaaaacaacatttgattttgccggtctcgtgctcgcgtatgacgaggaaactcaaatggtgacgctccagcagcgcaatttctttaaacaaggtgacgaagtggaatttttcggtcctgaaatcgacaatttcacattcacaatcggcactatttgggacgaagacggaaacgagcttgatgctgcccgccatcccctgcaaatcgttagatttaaagtagacaaaaagatttatccgagcaacatgatgagaaaggggaagtaatcaccaatgggtaagagtcctgtagttataggcatcgcaggaggttccggatcaggaaaaacaagcgtcacccgttccatctatgaacagtttaaaggacactcgattttaatgatccagcaagacctttattataaagaccaaagccatcttccgtttgaagaaaggctgaacacaaactatgatcacccgctcgcatttgataatgactatttaatcgagcatattcaagagcttttgaattaccggccgatagaaaagccgatttatgattataaactgcatacgcgttctgaggaaaccattccggttgagccgaaggatgtcattattctggaaggcattctcgttctcgaagataaaagacttcgcgacctcatggatatgaaactttatgtcgacacggacgcggatctccgtatcatcagacggattatgagagatattaacgaaagaggccgttcaatcgattctgtcattgagcagtatgtgtccgtcgtcagaccgatgcacaatcagtttgttgaaccgacgaaacgctacgcggacatcattattccggaaggcggacaaaaccacgtcgcaattgatctgatggtcacgaagattcaaacgatccttgaacaaaatgcaattttgtaataccatagcatagacataaataactcagaccatattatgtataggctggaagggaatgagacagttcccttctttccctgtttataaaccgaaacatttgcagaaaacacacattcagtttaagataaacagtacctatatgggagagaagaacgaggactgccctgtgttctcattcttgattttttcgtttatgctctcatacataatcacacgttattgttgagggacaaccaccaaggagtgaaggaacatggcacaagaaaaagtttttccgatgactcacgaaggaaaacaaaaacttgaacaagaattagagcaattgaaaacggttaaacgtaaagaagtagtagagcgcattaaaatcgcaagaagcttcggagatctgtcagagaactctgagtatgattccgcaaaagaagaacaggcatttgtggaagggcgcatcacgacgcttgaaaacatgatccgcaatgcgaaaatcatcgaggacgacggcggttcaaatgtagtcggtttgggaaaaaccgtatcattcatcgaattgcccgacggtgaagaagaatcttacacgattgtcggaagcgctgaagctgatccgtttgaaggaaaaatctcaaacgactcgccaatcgcaaaaagcctgctcggcagaaaagtggacgaagaagtgacagttcagacgccgggcggagaaatgctcgtgaaaattgtgaaaatttcataagatccgtttaacaatgaaacacctcgtccaaaatgtggatgaggtgttttttatgatcgtatcaaaaaggctgaaaacggccgtgatttgttttctgctcgtgtttttctttctgcttgcaaggctggctgaaattcagctgttttttacagaatctttttcaaaatccaatattaatctgattcaggaaagcgtcaagcagcggacggaagaagtccttatttcagacggccgcggctcttttcttgatcggaacggcaaagaactgaccggaaaaaagcagcctgccgtcatactgtttccctttctcgtgacgcaggattggccggttgaccgggtatcagacattctcggaatgaaacagggggagctcaggcagctgctgacggaagcaaaaaaaccggtgatcctgaacagcagaaaaataaaacatttgacgaaacaatccgtggcaaatatcaattctttgaaatatcccggcatttacggcgtatatatgaaagacagcaaagaaacaaacatagccgctcatctgttgggcgcgacaaaccaggaccctgagcttttgaaaaagaaataccccggcaggaaggaactgccgatcacggcaaaaatcgggacaagcgggatggagcggacatttgatgagtttttactggcggatcaggacacaaaacttttgtatcatgtcgacggaaggggaaaccctttattcggaatggacgtcaaatatacggctgaagcaaacgcgttttatccgctgcaagtcaaaacctccatcgaccgcaatattcaaaaagcaatggaagatgtattgaaagaccgcgggttaaaaaaggggggagccgtccttttagacattgaaaaaagcagtgtgctcggaatggtatcaaagcctgacgccgacatgtcaaagcagcagacactgcaaaattacatgctgacgccgatttatccgggatcagtgtttaaaacggtgatcgccgcagccgcaatagaacaaaacgaagtgaagccgggcacatcctttaactgcaatctcaacctgtacggagagccgggggatgataaaggcacgctcagttttggagaaagctttgcccaaagctgcaattatacgtttacaagtcttgcggaaaaattaatcaaaaaagatgattccgttattgaaaacatggcggagaaactaggtctcacacagcgggcgggctgggaaggcaagctgtaccgggaagacggattcagacagctgtataatgaaaaaagcggggtcatttggggagatgacaaagacaaaaccgtaaaaaaagccgtcgcacagacggcgatcgggcaaaaaaacgtgaaagtcacgcctcttgaagtcgccaatatgatggcggcgatcgcgcgcggcggtgagaaaaaacaagtcaaaatcgcggacaaaattgaatacaaaaacaaaacgacgatggcgtcattcaaagaacagccgttaaaaggggaaaacatcgacaaatatacggcgcagcagcttcaaaaaattctcagagaagtcgtcacctcaccgaaaggaaccggccgaaggtttcaggatctgccgtatgagatagcaggcaaatcgggaactgcccagacgggaatgttcacaaaagaaaaacagacgctttaccacaaatggtttgcgggatactttcccgcggacaagccgaaatacgctctcgtggtgctgcacatggacacgccgggggataaggctctgacaaatacagtgttttatgatattgttaaaaaggtacatgaaaatgaaacaaatcagacatagaacaaccgctcagcccatgttaaaatatatgctgagcaagagggataaaggagtgcagaatgattgagcaataaacaatctcgttttgaaaaccgtgataagcgcagaaaagcaaatatggtgcttaacattttaattgctatcgtatctattcttattgtcgtcgttgcagtcagcctcttcatcaacagtccgtcgagcgacgtgagcgaaaaagcggacacgagccagaagcaggaaacacctgcatcaggcaagacgaagcagacatccgatgaagacataaaagacagcaaaaaagatacggcatcagacgatgacaaaaaagataaacaggataaggacacatctgattcatcttcagactctgacagcaaaaaagacgatgattcatcgaaaagtgatgacagcagcaaaaaagactctgattcaagcgatccttttaaaggcgcaaaaataacagagggcggctcatcaagcgatgttgagaaaacaattgttaacccaaaatggaaagcggtcggaacaaagcagacgggagaacatgcggcgacgtatgactcaagctctgaagactggtccgaaatgcttgacgccatctcttacgcaacaggcgtgtcaaaagatcacatgacagtgctgtggctcggaaacaatggaagcccgcaagatgcgaagggtaaagttttagacaaaacgaacggcaaaaagtatcaggtcaccatcacttggaaagacaaaaaaggctggaagccgacaaaagtagaaacgttaaaataaccgcaaaaaagcagctgattattcagctgcttttttctgtcatacgtcagctgaaaaatgcaccgacgcgctgtaaaggattctgccgtcaacggccgtcacctgatgggatacagaacggacgcgaagcataatcgcctggttgttttcaatctgaacgtttattttcttttcaagctcctgcaaagatgccgcttcgaaaaattctactttatctttgattaaatccaattgaaaattcatcagtacagatcctcctgatttttcttctgagtcaatgaaagtataagcctttctgccgtaattgcgcaataatcccaaagtattttagtacccttccattcttttttgtgataggataggaactgttccacgattaatccatactatactcataggaattataaattatggagagtgaaaaatatgggccgtgaatttattccattatttgaagattgggcagcgacttatgatgccacagtgcacggggcagacaaacaatacgctgatgtttttaaagggtatgacaatattcttgacagcatcgtcgcactttcgggttctaacgttttagagttcggaccgggcacagggaatttaacggcgaaattagccgccgcgaacaaaaaggtgtttggtgtagaaccgtctccgtcaatgagaaaactggcggctgacaagctttctgacaaagccgtgttcagtgacggagattttctggagtttcccgctccgccttttcaaatagataccatcgtcagctcgtacgcctttcatcatttaaccgatgaagaaaagcaagcggctgtaaagcaatatggcacaatccttcagaagcatgataaaatagtgtttgccgataccgtctttaaagatcatgaagcttatgatgaaacaattaaaaaagcaatccgaaacggctatcatcaattagcggacgatttaaagacggaacattatccgacactcgggacaatgaaaaacatcttttcagaagagggatttgccgcgcggtttacgcagcaaaatgactttgtctggataatggaggcgattaaacggtaaatcgaagggattgtgtataaatgaaactggcagtcatcggagcaatggaagaggaagttacgattttaagaagcaaactgaaagacgcaaaacaagagatgatcgctcactgtgagtttacgacgggcagctatgaaggcgtcgaagttatcttgctgaaatcggggatcggaaaagtcaacgccgcgatcagcacgacgcttctgcttgaccgtttcaaacctgattatgtgattaacacaggctcagcgggcggttttcatcatacattgaatgtaggcgacgtcgtcatctcaacagatgtccgccatcatgacgtggatgtgacggcgtttgactatgaatacggacaggtgccgggtcttccggcagcatacaaagctgatgaaaagctgatcagtattactgaggaagcggtttctgaactgaacggcattcaagtcgccaaaggcacaatcgctacgggagattcttttatgaatgatccgaagcgggttgaagacgtacgcgccaaatttgcggatttgtacgcggttgaaatggaagctgcggctgtcgcacaggtgtgccaccagttcaaaacgccttttgttgtcatcagagctttatctgatattgccggaaaagaatctgacgtttcatttgataaatttttagaacaggctgccgttcattcaactgagcttgtcctgaatgtcatcaaacgaattcactaagcgggggattctcgttctcctccgcttttccaggaggaggacatatattgaacgtgataacagatattacagaactgatcggaaatacaccgctgctccgtctcaagcattttgatataccggagggaacagcggtttatgctaaacttgagatgatgaatccgggcggaagcattaaagacaggctgggcggaatgctcattgaagatgcgctacgcacgggaaaggtgaaaccgggcggtgttatcatcgaagcgactgccggaaacaccgggatcggactcgctctgtgcgccagaaagcatcagcttcgcgccgttttttgcgtcccggagcatttcagcagagaaaagcagcaaattatgaaagctctcggagcggacatcgtgcatacgccgagagaagaaggtatgcagggagccattcgaaaagcgcttgaactggagagagagattaataattcttatgccgttctgcaatttaaaaaccgagtaaatccattgacttactataaaacgatcggacctgaaatatggaacgcgctcggcggggatatccacacctttgtcgcaggagcgggttccggcggcacctttgccggtacggcagcttatttaaaggagaaaaatcctgccgtcaaaacggtgatcgttgaaccggaaggctcgatcctgaacggaggagagccgcatgcccataaaacggaaggcatcggcatggagtttatccctgattatatggacgagaaccattttgacgccatttacacagtggaagacgatacggcgttttcgcttgtcagagaagcggccgagaaagaaggcctcttaatcggaagctcttcaggggcggctctttatgcagcgcttgaagaagcgaaaaaagcgcccgccggatcaaatatcgtcactattttccctgacggcagcgatcgatatataagcaaaaacatttttcaaggaggtcagtaagatgaagaaaaaaacgctgatggtgcacggaggaattacgggagatgaaaaaacaggagcggtttccgtaccgatttatcaagtaagcacgtaccggcagccgaaagcgggcgagcatacgggttatgaatattcaagaacggccaatccgacgcggacggcgcttgaaagcttaattgcggagcttgaaggcggcgcggcgggatatgcgttcggctcaggcatggctgcgattactgccgtcatgatgctgtttgacagcggcgatcatgttattttgacggatgatgtatacggcggcacttaccgggtgatgacaggtgtgctgaaccgcttcggtattgaagcggactttgttgatacgagcagtgaagaaaaagtcaaaaaggccattcgcccgaatacgaaagccatttatatcgaaacaccgacaaacccgctattgaaagtgactgacctcaaactgatgtctgacatcgcaaaagaagcgggcgtattgcttatcgtcgataatacattttacacgccgtatttccagcagccgctcagctttggcgcggacatcgtgctgcacagcgcgacaaaatatctcggcggccacagcgatgtcgtcggcggcttagttgtgacggctgataaagagctcggtgaaaagcttcattacgtgcaaaactcaacgggcggcgttttaggaccgcaggattcatggcttttaatgagaggcattaaaacactgggactcagaatggatgccatcaatcacagcgccgggaaaatcgccgagctgcttgaagcgcatgatgccgttcagacgctctactatccgggatcagcgaaacatccgggccatgagctgacaaaagcgcaaagctccggtttcggcggaatgatttcctttgatatcggcagcagtgaacgcgtcgacgcgtttttagaaaaattgaacctgtttacaatcgctgaaagcttaggagcggttgaaagcttaatctccgtgccgtccagaatgacgcacgcttcgattccgcgcgaccgccggcttgcgcttggcattaccgacgggcttgtacggatctcagtcggtattgaggatactgaggatttaacggcggatgtgaaacaggcgcttgattcccttttataaagaatggatagatttacattctctgtcggctgtcagcttgtattataatgttggtagactataaaactggcaggtgaccttatatggagaagaaaagactgaaatcattaatagaagattttaagcattacgcatttattctgcttgcagtcagcaccttcatttatatcggcgcggttcttcccggacaagggctgactgcgggccagaaaatgctgatgtttgtaacggattgtgcatttttagcgggcgcttatttctgcgttgaccgttcacttatttataaaaagaggctggaagaggccgaagaataaaaaaagccattgtcttttgacaatggctttttcatttcttattcagaaggggtttcgcgtaattcttttcccattccttttaaaaactgcagcccgaagccgagcgcgcggttaatatcaggatcaccgacggctttcatcagttcaaacatactgactttcctgtcctcttttaaaaatctttgcgcctggtccgtcccggccatggcgctttctaaaagtctgcccataaattcgggatcagcttttgacagcgcgcctcccgcggccatcatcgtattcaggagattggtgacaggttcccgggaaatctgtccgagtgcgattttggcaatctcctcttttgcctggagcatatagccggcggcatcaaaaatgcccaagccattcagctctgccataatggacatcgttttcgcgacggcttcttcattttctgcgagaagcgtcttcagttcttccagtttttcagctttcagctgttcctctgttttcgtttctttttgaatttcagtaattgggcttgccattatgtttcctcctttccttaatcagttaggtgcacatagcccggacggttccattttcgctgagcttccacaccgttttgcggatgacgttttttgttccgcggattcgttttcggaagcggcggtgtatcacaggaaccgagcacttccatgcggacttttgtctgtttataggcaggtgtatgtgtccgtgaatcatacgcaggcccggtcaggaaattaatcgcagaatctttatctgtagagttcatcggcagataaagctcatttgcgcggacacggtctgtcacaagcgcattcaatttaaccgccccaaaaggagagacgagccggatcattgttccgtcgcaaattccgcgttcagccgcgagctccggcgatacttcaacaaatacatccggaactttagactgaatgccttttgacttgtttgtcatgtttccttcgtggaaatgttcaagcatccgtccgttgttaatatgcaggtcatattcttcagggaatacggcaggctccacccaatcgctcagcgcaaaacgggcttttttgtccgggaagttaaagccgtcttcataaagaagcggagtgctctctcccgtaaagcttccccacaggaagctgttccagccgctaagaacgtcgtagcttgcttttccgaacagcggagaaaggctcgccatttctgagaaaatgtcgcttggatgcgtgtaattccaatcagcgcctaaacgattggcaacctcctgaataatccaccagtcgggtttggcatcgccgagtgtcggaagcgcctgatacaatctttgtacacgacgctctgtgtttgtaaatgttccgtctttttcaagagatggaaccgcaggcaggatgacatccgcgtattgcgccgttcttgaaaggaaaatatcctgtacaacaaagaaatcaaggctggataaaatgtcatgaacatggttggcgtttgaatcgacgagcgccatatcttcaccgacgagatacatggctttcatgtttccttcttcaatcgcatggagcatttcaatattatcaagacccggcttgccgtcaatttcaacaccgtaagctttttcgaatttagcgcgtgccgcatcatcggtaatatgctgataccccggaagccagcctggaagagttcccatatcgcaagcgccttgaacgttgttatgtccccgcagcggataagctccggcgcccggacggcggtagtttcctgtggcaagcagcaggttggaaatcgccgctgatgtatcagagccgcctgtattctgggtaacgcccatgccccaaagaacacaagtgccgtctgcatcacgaatcatttcggcaatgcggatgatcgtatcctgagaaagtccggtgatgcgctccgcatattctaatgtatactttttcagcgtttctttataatcttcaaagtagttgacattctcatcaataaacgcttgatcgtgccagccttggtcaatcatatattttgtcactgccatgagccagacttggtcagtcccttgtttcgggctgataaagaggtcggaccgttcagccatttcatttctgcgcagatcggcaacaattaatttttgtccgtgcagcttatgtgcacgtttcacgcgtgtggccagaaccggatgtccttctgccggattggcgccgacgatgagcacgaggcccgcttttgcgatatctttaattgtgccggcgtcaccgcccataccgactgtgcggaataagccgtccgttgccggtgactggcagtagcgtgaacagttatccacgttgttggtttcaaatacttgacgcgctaatttttgaataacgtagttgtcttcattcgtaattttagaagaagaaataaaaccgacagaaccatttccgtgttcggccttgatcgaaccgagtcttgaagcgacaagatcaagagcttcttcccatgacgattcaacaaatgcgccgtttttccggataagcggttttgtaatccgttcttccgaatttacgaagtcccagccgaatttccctttcacacaagtggaaatcgcattaaccggagcatcggaaacaggctgaattttaaggatgtcacggccttttgtccatacttcaaaagagcatccgacgccgcagaacgtgcagactgtttttgtttttttcgtccgtttatcgcgcatagccgcttccacttctgacacggcgaagatgcttgtatagtcgggttcaacatttttcactaaatcaatcatcggttccatgacatcttcttttattcctgtcataaatccggcttggccgagcattgatttttccatcagtgcgttacaagggcagacagtgacacattggccgcagctgacgcaggatgattcattaatggggacgccttcatcccaaatgacccgcgggcggtcgcgctcccaatcaattgaaagggtctcattcacctgaaggttttgacacacttccacacattggccgcaggcaatgcattggttcggatcatagcggtaaaacgggtgagacatatcaaccgcgcactttgaatcatctttcggcgtatacggatatttctgatgctcaattcccatcatttccgctgtattatgcagtgtgcagttgccgttgttgttatcgcataccgtacagtaaagcaggtgattctcgagcaggcggtccatggcctctgtctgagcctcttttacccttcccgacgtaagcgagatggacatcccgttttctgcagccgtggaacaagagcgctgcaatttcccgtttacttcaacaatacaggtgtcacatgtttgaatcggatctacttccggtacatggcatatttgcggaatctcaattccgttttggtttaaaatatctaaaatcttagacccctctggtgcttcatactccgtgccgtcaattttgacacggatagactgaacgtctgtcacttccaattcccctccatcttttaaactcgaaaaaaagccatgcacatagataccggcctcctgtccggagaacggtataaatacgcatggcggaatagttcactagcaagtcttactaacagaccaatcctatttgtataaaacgatagactcataacacgtttcctattacaaatccatcttcactgcttttattataaggtgatatttattataatacaatacgaaaggaaaactttaaccaggtgaaatgtcacaaaggggaaccgggaatgtctttcataggctaaaatcggaggggacaatatgtctaaaaaaattcatgaatttaacgatattatccggaaattgcgcaaagaattatttggaaaggggccggaacgaattcacaccgtttttgtggataacatggcggtatcaacgctttacggcaatctaagcgcaagtgagcagtttatcgcacgcacgcctgaaggaagagaaatggttcatgcggcgcggaccagcttaattcaggaactgtattcaaaacaaacgcctgacggaatggaagagctcatcggagcaaagctcgtgcatctgttttcagacatcaagatcgaagagaatattgcggtgtctgtatttgtctttgaccgaacaattgaagagcgccgtgaagaaatcaaaagctgaaaaaaattcaattgacacgaaattgtcacatttgatatgatatgaactgcctgcagtggcttaaggacgaattttatggaatgtgtgcatgatctgtacattttctatagctgatattttcattctgcttgatattgttgtatgggtatgcatacaagttaggcagcattcaaacccgttttagacgggctgtttgaatgctgccttttttgttaggcgtctttggaaactgcggggctgaaatgataaatggaggggttattatggcttttcgtaaaccggacgaaatagcggagcttgcggtcgaatcaggggtaaaaaaggtgcattcaccgctttcagcactgattgtattaggatttttgggaggagcgtttatcgcactcggttatttgcttgatatccgtgtcatcggcgaccttccgaaagaatggggaagcttgtcgagtttaatcggggcgtccgtgtttcccatcggattggtgctcgtcgttcttgccggcgcggagctgattacgggtaatatgatgtcggtatctatggcgcttttttccagaagaatatccgccggtgcattagtgaaaaattgggtgatcgtgacgttgatgaatcttgtcggcgcactgtttgtcgcttactttttcggacatgttgtcggattaaccgaaacaggaccttacttggaaaaaacgattgcggtcgcacaaggcaaattggatatgccgtttggaaaagttattgtttcggcgatcggctgtaactggcttgtctgtttggccgtctggctttctttcggcgcagaagacggagccggaaaaatcgcgggtatatggtttccgattatggcgtttgtcgcgattggttttcagcacgttgtagccaatatgtttatcatcccggctgcgatttttgcaggttctttttcgtggggtgatctgattggcaatctcattccggcctttatcgggaatgtaatcggcggggcagtgtttgtcggccttatttattttattgcatattcaaaaaaagatcagaaaaagcaagggatgaaaagagtttcctgaggtaagaaagatgccggaaaacaaggacaattgaagcggaatgccagcacattttccgtccaaatcttgaaaaaaatgtttacaaaatggaagctgatggatatacttacaaagtaagaaaaaagcaaagggaggttgaatcacatgacgactttaaacggcaatcaaaatttacaattgaaccgattcagcctgtggaagagttcgtgtccttccttaacctctgcccgtcaagcacgttaatttcggagtatcaggacattcgcagctccccgcagggaaagaagcacgtcttcttttgtctgcggatttagtctgcccgcagcgcatatgaagtttgctgcgggttattttcgcttgtgcggatattgaaagggggtgagcgataatgaccattaatcttttctttttaacactgaccatttcaaagcgttttaaaagtgcggaagagtatgaacgagaacagcaggtcgaagagttttataatgaagcgaaagaacgccagctgaaacacttttatatgaactgaacggacacgaagggccaaaacggaggagaaggaggagatcatcatgttcagaattgaactgctgaatcattacacaatggagaaggaccaggtttagcgaggatgttgctgtcacgtcgcagacggcctgcataccatggtaaagaaagaaaaattggtaagcgggtgatagcatgcaaggcggtcagaacagaattccatccatcgggcacgggtatgcgtcaatgccccattcatttaaacacggctacggcaacccgtatcgccggcagagaatggcggcgctttcccggcagacaagatatatagcaccgtattattggtactagagcaggcggaaaacctacgttttccgtcttttttttatgaaaacaaatataaatttcaaataaatcgaaacgttcatgaagagaagtgcgtctagttagtacctcatactaatacgaggtaatattatttctgaataataaatcacaggaatggaaaagcgggtgttatacaatgttgcaacatacatcttcagcattaaaacgaatgcgcgcgaaatactttgctgcatcagaactggcagagtcagtcattcagcaaatcttgatggacatacaggaatacgaccgcattttggaaatcgggaccggaaacggctcaatgtttaaacaaatcatcggacagcttgaaaagggcagtcttaaaagcatagaaacatcgaaacgtaaaatacggaaaacacagcgcgcaaaccgttcggttataaaagccgggcgcggaaacattcagcaggggaggcctgaaagcttaccgttccgcgatcgcagctttcataaagttttctcattacatactgctgaaacagtcagcgattacaggacagcatgtaaagaagtgtaccgcgttcttcaaattgacgggtgtttctatatggttttgaaaccttcgcggatgagtgagaaggatgtgattgaggtgctctatgatcagcatttcagagacatttcagttgtcagcagagattcattccattttattactgccattaaatagaatatttcttgggaaataaaaagagctgcttaagtcactgcagctctttttgtgaaattgggcatatttccttatttttggttatttcacatctattttatattaaaaaaagtttttttcttatacaatggtaatcagatgaccgtacattttaaatgttttgaacaaacggaatgaatattcattccgcatctggaaagggggatgaaatgacagcttcaaacaaggttgaactcattatgaaagcgtcgcttactttgtttacagatagaggatttgacgcaacgacgattccgatgattgccgctcaggccgatgtcggaaccggcacaatctaccgttactttgacagtaaagagacacttgtgaacgtactgtatcaggaaagtgcgcagcgttttatgaaaaaagtcaaaacggactttcagggtatctctgtaagagaagggtttcatcacctgttttattgtctgattgattttacgaaggaaagtgagtatgcattgttttttcttgaaacgaataaggacgcctactttctgaatgaaacgagccgtaagcttcttgatgaaataacacagatgcttgacgtcttttttcagcgcggcaagtctgaaggtgtgctccgcaatctgccgtccaatgtgctgatggcgctgctgctcggggcatatctcaaactctatcagcttatccggacgggaagcgtcgaaataacaaaaccgtttctgaaagaattggaacaatgttcttgggatgccatcagaactcattaactattcgccgaaggaaggaagatcgatatgaaacagctaagcgctataccgcagccgaaaacatacggacctctgaaaaatctccctcacttggaaaaagaaaaactgtcacaatcgctctggaaaattgccgaagaatacggcccgatctttcgtttcgaatttccgagctctgtcggggtcttcgtctcaggccgcgagctcgcggcagaagtctgtgatgaaaagcgatttgataaaaacctcagcaaagccttgctgaaagtccgtgagtttggcggtgacggactatttacgagctggactcacgaaaagaattggcagaaagcgcatcggattttattgccgagcttcagccagaaggcgatgaaaggctatcattcaatgatgcttgatattgccatgcagcttgtgcagaagtggagcagattaaatccgaatgaagaaattgacgttgccgaagatatgacgcgcctgacgctggatacaatcggcctgtgcggatttcattaccgctttaacagcttttaccgcgacacacagcatccttttatcacaagtatgcttcgcgcgctgcaggaggcaatgcgccaatcacagagacacagcctgcaggacaagctgatgatcaaaacgagacatcagttccagcaggatattgaagtgatgaatgaactcgtagaccggatcatcgctgagcggagggaaaatccggatgagaatctgtctgatcttttagcattgatgcttgaagcgaaagatcctgtaacgggtgaaaggctggatgatgaaaatatccgctatcaaatcattacctttttgatcgcggggcatgaaaccacaagcggactgctttcattcgcgatttactgcctgctgaaaaataaagataaattgaaaaaagccgttcaggaagccgagcgggtgctgacgggagagacacctgaatataagcagattcagcagctgacatatacccgcatggtgttgaacgagactttacggctgtatccgactgccccggcattttccctgtacgcgaaagaagatacggttctcggcgggaaatatccgattgcgaaaggacagccggtgacgattctgactccgcagcttcaccgggataaaagcgcgtggggagaagatgccgagctattccgtccggaaaggttcagcgatcccgcggcaattccggctgatgcgtataagccgttcggaaacggacagcgcgcatgcatcgggatgcagtttgccctgcaggaagcgacaatggtgctcggccttgtccttaaacactttgaactgattgatcatactgattatgagcttacgattaaagaagctttaaccattaagcccggtgattttaaaatccgtgtaaaaaacaaggacgtgtccaatcatcagcccgtacaaaaccataaagctgaaggcggcggtcacaaagaagaaacgaaagaaatcccgtcccacggaacgccgcttctcattctttacggatcaaatttaggaactgcggaaggaatcgcggaagagctggctgacatcggcagaagcaaaggattttcaactgaaaccggcccgctcgatgattatgccgggaaactgcctgtaaaaggcgcagtcgttattgtgacggcttcttataacggggcgccgcctgataatgcggcgggttttgtgaaatggatggaaacccttgaagatcaggaattaaagggtgtttcttacgccgtcttcggctgcggagaccgtaactgggccgccacttaccagagggtaccccgcctgatagacaaagtgcttgaagaaaaaggggcaaaacggctgacttctatcggggagggcgacaatgccgatgattttgagtacagtcaggaagcctgggaagactcattctggaaggacatcatgaaggcttttcatatagaggccgctccaaaacaggcaaacaaatcacagttatcaatcgaatacgtaagtgaagcagccgagacgccgattgccaaaacgtacaaagcatttgaggcggaagtcatcacaaacaaagagcttcataccgaaagcagcaagcgttcagtccggcatattgagctgcgtctcccgaagaccgaaacgtatcgggaaggagaccatctcggggtgcttccgcaaaacagcggggaactgatcagccgtgtcattcgccgattcggtctcgacccaaatcagcactttaagatcaagggccggcagctgcctcatctgccgatggaccggccggttaatgcgccggagcttttggcgtcatatgtagagctgcaggaaccggcaacgagagcccagcttcgcgaacttgccgcccataccgtgtgcccgccgcaccaaaaagaattggagcatctttattctgacgatgcggcatataaagaaaacgtgctgaaaaaacgaatgaccatgctggacctgctggaagattatccggcgtgtgaactgccgtttgagcgctttttagaacttctgccgtccttaaaggcgcgctattattcaatctcaagctcaccgaaggcaaacaaaagggagctcagtatcacggtcggcgttgtgacggctccggcgtggagcggccggggagaatacaagggcgtggcttcgaactatttagccggattacaaaatggcgattctgccgtctgtttcatccgctcgccgcagtcgggtttcgcattgcccgaaattacgaaaacgcctctcattatgatcggagcaggcaccggaattgcaccgttcaggggatttatccaggcgcgggctgcagaaaaaatgtccggtaacagcctgggcgaagctcatttatacttcggctgcagacaccctgaagaagacgatctgtacaaagatgaattcgaccatgcggagaaaaacggccttgtcaccgtgcatcgggcgtattccagattagatcaggactgtaaagtttacgtacaggatgtcctgcttcgcgaggctgcacagattattgcgcttcttgaccaaggcggccatctctatatatgcggagacggaagcaaaatggctccggctgtcgaaaatgtactgcttcaggcgtatgaaaaggtgcataacactgattcaaaagtttcctcgaattggcttgaacagctgcaggcggaaggaagatatgcgaaagatgtttgggcaggtgtgtaacagaagcgtaaggcaattgaagattgtgttttaattgaagaaagccggcacgatatttgaaatctactgaatcaaaaggaatagttatagggagtatcgtgccggccttatctttagtatcggacaaaagacacaaatctttaatgtttttattgatttacatgcaggcggctatgtcccttttttctgaattccgccagaaataaaaccggataagacagcaatagcaaaaccgaaataaatgaaatgataccgatccaatgaaaatgcgtccaaaagaaaccgccgcaagacccggccgcgcttgacccgatatagtatgcaagcagatataatgaagaagcttgcgcgcgctgatcaccggctgctcggccgacccaggcgcttgcaattgaatgtgcgccgaaaaagccgaaggtaaacacggcaatgcccgcaattttaagggcaagctggggcaaaagtgtcaccgctgcgccggcaagcataacaaaaatcgcaatcttaatcatttttgcacttccgaaaagatctgcttttttccccatatagacagagctgaacgttcccgcgagatagacaataaaaataaaaccgattacagtctgtgacaaatgataaggagccgccattaaatgaaagccgatataattatataatgtcacaaaactccccattaatataaatcccagagatattaacaaaagcagccgtttgcggtgtagaaccgctccgtattccttacatgccgcttttacgcccgcatgccgctgagatgaatggcgcggagccggaagaaaacgccaaaacaaatagcttaatataatagaaagaatgccgataatggcaagcgccggccgccagccgaatacatcagtcagaagccccgttaacagcctgccgctcattcccccgatgcttgtgccgctgatatacaggcccatcattttcccgaggcccttcggatcaaactcctcgcctacatatgtcatagcgacagcaggaacgcctgccagaaaaataccgagcagccccctcatcgccaaaagcgccggaaaagccggactgaacgctgttaatagacctaaaacagaagtggctgttaacgacagcaccattaatttttttctgccgaatccgtcagacaacgaagcagcggccaataatgaaaatgccaaaacggctgttgagatggataaagttaagctggcagccgcagcggaaatatgaaactcttccgaaaacaaaggcataagcggctgtgtcgtgtaaagcgtggcaaatgtcacaaagccgctgataaacagtgccaagctggcctttctgtaagcctttgtatgaggctgaataaacgtcatgaatgtccctcttttctcactgttggttatatatgtatcgtacgcttttcatttcaatgtgtctaatttataataactatagaattaatgcgtgtaggttatgaagaaaggggagaaggagaaaatggagcttcatcaaattgacaacttcattgcggcggcaactcatcagcatttcacaaatgcggcaaaagaaagaatgatttctcagccggcattaagccgatcgattatcaggctcgaagaagaattaggcgcgccgttattttacagagagacaaaagccgtccggctgacaaggcacggagagcagttcttaataaaagcaaaacaagcgagacgagctttaaatgaaggcgttgaacaagtgaaaaaaaatatgagcctggagcacggcgaaatatctgtatcttttcttcatacgctcgggttgcgcttgatgcctcagctgattgccgaatttaaaaagctatacccaaacgtgaccttccggctgtatcaaggcgcaaatgaaacgcttcgcaaaatggtggaaacgggagatgcggatatctgtctcagctccccgccgcttcccagcgagcttttacaatggacagtgctggagaaagagcctctttatgcggtgcttcctgagaaccacccgcttgcagaaaataaaagcattcaaatgaaagagatgcaggacgaggattttgtcggatttaaaccgggatacgggctgagatatatgtttgatctgatgtgccgggatttgaatatacacccgcatctcgcatttgaaggagaggaagtgtcaaccatattagggctgaccgccgcgggtcttggggctgcagtgctgccgaaaaccgcggagcattcatactttccggtcgtttttctcccggttgcagattaccaatgcgaacgcaccatagcgttagcccagttaaaaaaccatgctctctctcccgctgctgagcgttttaaacagtttgcacttgattattacaaagcacgcaactgagcggtcattttattaaaatcgaagttgaaaataaagcagaaagaaatacagaaaacggaggataaccatggcgaaaaaaacagtgaaaacaaatgctgtccgtatcattgagcagcaaaacattccctatgagctattaggttacaaaacagaagggggacagcccgcagacggtctttccgtttcacaaaaaatcggatactctgccgaatatgtttataaaaccttagtggcatctgcaggaactgatcgttattacgtctttgtcgttcccgttgcaaaagaactgaatctgaaaaaggctgcgaaggcggcaggtgagaagaaaatagaaatgattgccatgaaggaccttttgggagtgaccggctatatacgcggcggctgctctccgatcggaatgaaaaaaaggtttcctacttttattgatagatccgctgaaacactggcgtttatgattgtcagtgcggggaaaatcggaatgcagctaaaagtagcgcctcatgatttagccgaagcaagcggggcggtatttacagacattgtataaatgtccggtggatctaatggaatacacgtttcaagggagaatgataatgaaaaaaagatatgaaaacttgaatggcgtgaagaatgaacatggattcatggacatgtggaaatggatgaaagaacgaagagaaaaaagtaaagatttaagcgagaatattccgaaagcggtcacaagggatgtccgtgatgttgccgtcaatcggacggaaaccgccataacatggatcggccattcttcatttctgatccaaatacaggggcttaacataatgaccgaccctgtatgggcgcggaggatgggttttcaaaaacggctgacagagccgggatatgaattgagcgaactgcctgacattgatgccgtgctcatctcacatgggcattatgaccatcttgattttccgagtataaaaaaactgagaggaaacccggatttttacgtgcctgcgggattgaaaaagctgttcatcaaaaaaggccgcaaaaaggttcatgaaatgaattggtggggtcgttttgagatgcggggggtgaatatatcatttgttccggcccagcactggacccggagaacgctttgggataccgatacttctcattggggaggctgggtcatagaaagcgaaaacggcgagtccatctattttgcaggagatacaggctattttgaaggctttaaagaaatcggagagaggtttcgtattaaggcggccctgatgccgatcggagcatacgaacccgaatggtttatgaaagtgtcacatatcaatccggaagacgccgtgaaagcttttttagagctgaaggctgacagcttcattcccatgcattacggggcattccggcttgctgatgatacaggcccggaagcattaagcagactgcacggtgagtgggaccggcttgcattacctcctgaaaacctgagagcattagcgcttggcgaaacattttggctgtaacagcaggttttcgctgccgacaccaatcgtttaaaaacggttggtgttttgttgtcaaccaaaggtgaacagcctcagtataaaacatgatttttccggaatctgcggtaaaaaacaaaactttttactcttttgtttcactatacaatgaaaacggtttcgtatgcgcggtatatttaacctatcacaattgctccagcagaaacggacaggaaggatagaaaaacagatgaaatacatgaattcaagacagaaaaagattttgtatctgttgttatctgaacctgatgactacttagttgtgcaagatttcgcagacagggtccgctgttctgaaaaaacgatcaggaatgatttgaaaacgattgaagatttcctgaatgaacatgctcaagctcagctgatccgtaaaccgggattaggcgtctatttacatatatctgaacaggaaagatcacggttaagccggcacatttataatgagcactttacatgcaggcacaagaccgatgaagaaagaatacttcacatcgcttatgatttattaatgaattcaaagcccgtttccgcaaaagaaattgccgcacagcattttgtaaacagagcttccattaaaaaggatatcagtgcggttgaagagtggctgaagcgatttgatctcacactggtttctaaacagcggctcggcttaaagattgaaggggacgaaaaaaacaaaagaaaagcattggcgcgaatttcagatttgattgataatgcggagtttacaagccaatttataaaaagtaagtttttaagtcatgaagcggactttgtgagaaaagaaatcaagttattacaaaaaaaccattctatctattttacggatgaaacatttgaaagtttgctgctgcatacattgctgaccatccgccgtatcaaaatgaaacagccggtcgccatctctgcaaggcagctggaggcggtaaaaaagaagaaagaatatgaatggacactggcttgtttaaaacggcttgagccggtatttgccatccggtttcccgaggaagaagccgtctatttaactttacatataataggcgggaaagtgcgctatccattgcagcaagaaaagaagcttgatcttgaagattctgagctttccaaagtcgtcaggcatttgatcaatcgcgtttcagaactgaaaatgctggatttccataaagaccaggaattgatcaatggattgaacattcatctcgatccggtgttgaagcggctgagctatgatctctctgtttcaaaccccatgctccacgacatcaaaaaaatgtatccttatttgtttcatcttatcattgacgttttagaagacatcaatcaaacatttgatctttatattcctgaagaagaggcggcctatttgaccctgcattttcaggcagcgatcgaacggctgcgccgaagcagtcataaccctaaaaggacgatcatcgtctgccatatgggcattggcatgtcgcaattgctgcggactaaaattgaacgcaaatttcatcacattacgataaaagactgtatcgcaaaagcggaactgacagagtatatcaaaaagcataaagatatagatttcgtcatttctacgatagggcttggaaatgtaacgatccctcatatcgtcgtatcaccgcttttggagcctgctgatgaaaagaagctcagcgcatttatgcaacagcttgatacatcacaccgccgggagcaaaaaacgtttaaaatgctgaatgatacgactccgtttctcgtttttttacagcaagagacagagcaccgttatcaggtcattgaaaagctggcgcaggctttgtatgaaaaaggctatgtagaaaaagagtatggcattcatgcagtaatgagagaaaaaatgtcggcgacaaatatcggggcgggtattgccatccctcacgcgaactctaaatatatcaaacaatcagccattgcaatcgccaccttaaaagagcccattgagtgggggacggaaaaggtgtcgcttgtatttatgcttgccgtcaaacacgaagatcaaaacaaggtaaagcaattattcagtgagctttcctatcttagcgagcagccggcatttattcaaaaactgacggaagaaaaaaatgtgatgacgtttttatcgtatttaaactattaaaagcaggggatggctccctgctttttttctgtttatagggaaaaatgccgttatttccggaacttatggtaaaaaaacgcgcttatcacaggctgatttcagtataaagttgagacaagatcttgaaattcagactgcaaaggaggatttatatgaaactgttagcgattacatcatgtccgaacggcattgcccatacgtatatggctgctgaaaatttacaaaaagcagccggcagattaggcgttgagatcaaagtggaaacccagggcggaatcggggtggaaaataggctgaccgaagaggaaatccgggaagcagacgcaatcattatcgcggcggaccgttcggtgaacaaagaccgattcgcgggaaaaaagctgctggccgtcggggttcaggaaggcatccgcaaaccggaagaattaattcaaagagcgcttagcggtgaagtgccggtctatcaatctgcttcaaaaactgaatccgcaagtcagcagggcaaaaaacaaaacccgatttaccgtcatttaatgaacggcgtttcttttatggttcctttcattgtcgtcggcggattattgatagcggttgcattgacgcttggaggagaaaaaacaccaaagggcttagtcattccggatgcgtctttttggaaaacgattgaacagatcggcagcgcttctttttcattcatgatcccgattttagccgggtacatcgcgttcagcatcgccgataagccgggtcttgtccccggaatgatcggcggatatattgcggcatccggcagcttttacgacagtgcgagcggcgcaggatttcttggaggaatcattgcgggatttttggcgggatatgcggcgcttggaatcaaaaaatgtaaagttcctaaagcaatacagccgattatgccgatcattattattccggtgtttgcctcactgatcgtcggtttggcgtttgtatttctgatcggcgcccccgtcgctcatattttcgcatcattaacggtttggcttgcgggaatgaaaggctcgagctcaattctcctggcattgattttaggagcgatgatctcctttgatatgggaggacccgtaaacaaggtggcctttctattcggatcggcaatgatcggagaaggaaattatgaaattatgggcccgattgccgtttccatttgtataccgccgatagggcttgggattgcgacgtttttaggaaaaagaaaattcgccgccgcagaaaaagaaatgggaaaagcgtcatttacgatgggccttttcggtatcacggaaggagccattccatttgcggcccaagatccccttcgtgtgatcccgagtattatggcgggttctatgaccggctcggtgatagcgatgatcggccatgtgggggacagagtggcacacggcggccccatcgttgctgtacttggagcagtagatcatgtattgatgttttttatcgctgtaacagcaggctctcttgtcaccgctctgttggttaatgtactgaagaaagatatggcgaaatcccccgcgcccggtgaggtgctgccgtctgccgcaccaaatgaagctgcagcggcaaaagaaacaaaggaaccatctcaggctgacagccgaaaagccgggatgaccgaaatcaaaaaactgactgacattatcagcacggacttgattgaaccgcatttatccggcgaaacgagggatgacattatcgatgaaatgatcgagaaattgtcccgtaaaggtatgcttctgtctgacagcggatttaaacaggccattttgagccgtgaacagcagggaaccacggcgataggtatgaatatcgccattccgcacggaaagtctgatgccgtcagaacgccgggtgtcgcattcggaataagacgttcgggtgttgactggaacagccttgatggttctgatgcaaaactgatttttatgattgccgtaccgaaggaaagcggcggaaatcagcatctgaaaatattgcagatgttatcccgaaaactgatggatgacagctatcgggaaaggctgctctccgttcagacaaaagaagaggcgtatgggcttctggaagaaatcgaataaagcgggggatgatcatgtctactgaaccgatatttttcaatccggttttcaaagaaagaatttggggaggcgccgccctgcgtgatttccactataatattccgtccgagcggacaggggagtgctgggcctttgccgctcatcaaaatggacagagcacagttcgaaacggcatgtataaaggatgtacgctcggtgaattgtgggagcatcacagagatttattcggaaaccttgaaggagaccgttttcctcttcttacaaaaattttggatgcggaccaagatctgtccgttcaggtgcatccggatgatgactttgccaaaatgcatgaaaacggggaacttggaaaaaccgaatgctggtatatcattgattgtgaaaaagatgcggagatcattttcggccacagcgcaacaacaaaagaagaactgatatccatgattgagcgcggagaatgggacggacttctgaacagagttaaggtaaagccgggagatttcttctttgtcccaagcggcaccgttcacgcgattggaaagggcacacttattttagagacgcagcaaaattcagatacgacttacagattgtatgattacggaagaaaagatgcggacggcaggctgcgcgagctccatttggaaaaaagtatagaagtgacagacgttccatctgtccgtgaacggccgaccgttcaatataaacaaacagatgatctgctggcagctgttttaatagaatgtccttatttttcagtcgaaaagtgggatgtaaaaggtgaagcgaatttattccagaatcatcccttccttcttgtcagcgtgatcgaaggagacggaataataattgcaggcgggcatgaacatccctttagaaaaggagatcacattctcctgccttccggtttgggagaatataaactggcgggccatgcaaagtgtattgtgtctcatctgtaatcttcaaaacccttctctggcagcagagaagggtttttcatcacttttacaaaaaggccgaaatttccgtggtccgttcctgaatttaatctctcaatttgtatatctcccgagccattgattcaagtatgtacatagcggggatttgggtggtgatattcgcattttcaacccattcttccgtcacgtaatatgaaatattcacatcagacattttggcaatggttgaatgtttatgatttgtaatactgatgacccggcttccttcttgtttcagctgattcagatgagtcaccgtagaatctccttcacctgaaaccgataatgcgatcgtgatgctgttatggcggaaatgggaatgggccggaaagtaaggatctttaatatacattgaaagtttccctaagcacgaaaaatatctggctccgtattcggcgagaattcctgaactacccactccgataaaaatgacgctttctgcatcggctgcaagggctgctgcttccttcagcttttcttccatccctccgcttactgttctttcaaaaaactcggcaacggaatgatggggactctttaaaatcgtttttttatttgcctccgcatacattttcagcttcaccttaaactccgaaaacccttcacagtttatttttttgcagaaacgtaaaatagaagccgtcgatacatgggtttcatttgccaattcacggattcgcatatagacgactttctcgctgttttgggagatgtagttgtataaagaagtttcaagctcgttaaatgaagcaatcatttcgtgtgtgaacatgcagggggattctcctttttatgagaatggtgaatgtacatctcatcgtaacatatcatttttaaaagaaacatagtgttatatttatgtgacaaatcactttttgtgtcattcaaaacaagacgtcagccaatgatttacggtgcaaaacaactgcggatataattcgttcatacgcttatgcatgatctcttcaagggtctctgacaaaagcggtcgaaaaaaggaggacaatatgagtatcaaactgatagcggttgatatggacggaacgtttttgaatgatgaaatggcatataacaaagagcgttttatgaatcagtatcgtgaattaaaagcgcggggaattaaatttgccgtagcaagcggaaaccaatatgcgcagcttacatccttctttccggaaatcaaaagtgaaatcgctttcgttgccgagaatggcgctttcgtcgtgaatgccggagaagaattattcgcgggtaacatgtctgaagacactataaaagaggtgatccgtgctttagagcagtatgaggtgaaaaacgtcattgtctgcggaaaaaaaagcgcgtatattcatgaaaatgccagtgaggatgaatatctgcatgccagtaagtattattatgtgttaaaaagggtgccgcattttgaaaacatcgatgatgacattttaaaattttccatcagttttcccgccgaacattgttccgcacttctgaggcatttaaaagacgccatcgggtctttcgtcacgcctgtatcaagcgggcacggtgacatagatctgatcataccggggcttcataaagcaagcgggattaggcttctccagaaacaatgggggataaatgatgaagaatgtgcggccttcggagacagcggcaatgatttggagatggtgtctgccgtgaaatacggagtcgctatggataatgcgcaggaaagcattaaacaggccgcggcgcatatcgcgcaatcaaacaatgaggaaggggtcttaaacgcgattgattccattctcaaatgtgaaaaaccctttgtctgaaaaagacattttaactgcggaggtgctgaacgatgattaaattagtgattacggatttagacggcacatttttaaataatcaaggcgattttgacagaacgttatttgaaaagacaaaacgagtaatggaagaacagcatgtcgctttcgccatctgcaccgggaaacagtgtgaaagggtggaagccttattcggagaagacgcgaaagatttttggattttaggagacagtgccgcacgtatgaaaaagaacggcaaattcgtatatgaatctttgatcagcaataaagccggactgtcaattataggcgctttagaaaaaatcagctgcgggcacaccattatcgcgtgcacaaaaaaaggcgcgatcgtaaaagaaaatctgtctgaaagtgaaatgaaatatgtaaatgcctcttatgcacatgtaacgaaaataactgattttactgagataaaagacgattttatcaagattacggttcatgaccccgacgccaactgtccggaaacgagagaaaagctgcatgaattttttcaccaattatatatcgtagcatcagaagatacctggatggacatatcaaatatcggaatacataaaggatcaacagtacaagaactgcagcgattattaggggtttcggctgatgaaacaatggcattcggagacggccgcaatgacaaagaattgatggaagcggcttcctacagctttgcggttaagaacgccattgacgaaataaaagatgcggcgcactttgtcatcaaatcaaatgacgaaagcagcgtcatgcacacgattatgagaatattagcgctgcaaaaacaatgagaaagcagatgggctaaagccaatgcggcaggacttactaggaaaagaaaaagcgggctatcctccgactttaaatcactcctgattttccgaaaatatgttaaaaatgaataaatatctatatttgacccaattgtattggtataatatgtataaaatgaatgaaacggcgtaatatcaagatgaaataaatcacttcatatcatttgatatcagacaaaaagtaggaacttcctcgttttgaaattgggaggtgtttgtattagcccgctgttgagtcccgcgtatatcattctcatttttcttccagcagcttcttttctgttagggattttaggatatttcatcttcaaaaaagtatggatgatggttgttattgtattcattttgtccttgatatttatgtttattgtaataggtgccgaaccgacatttttcatttgggtggctatgatgacggggagctgttttatctccggttcaatcactaagacggtatggacttttgtaaagcgaaaatattagacacagaagaatcctgtttgaacagctatccttttttgccgattgaagaaaaggaagtatagagtgatctgttatgttcttatattttgtctgttattgtattgtctgtgtatcgttttgttcttttttaactaaacggagcgctataattgaactgcagatatatagaaacacaaaaaaggataaggaggatttttatgtttcaaaccttagaccattttttgaaatcttgggaattcgaagccgatgcgacacaaaaactgctgaatcatctgactgatgaatcacttaaacaagaaatcacttcacaacattggactttaggccgtattgcatggcatactgtcgcggccattcatatcattacctcgaacacagatttaacgttccacgctccggctgaagattatcctgttcctgcatcggcgcggtttattgctgagagttatcatcaagccagtaatgcatttgtgcaggcgttaaaaacgcaatggactgacgatacacttcaagaatgtgtcaactttattggtcagcaattgccgaatggttcacttttgatgtttttaattcaacatcaaaaccatcatcgaggacaaatgactgtccttatgagacaagcaggtttacctgttccgggtatttatggtccggcaaaagaggaatggacaacatttggtttggaagctccgaaataggatgttgttgtaagggctcgaacgaatagatgataccaatcaatgttggtatcttttttgtattagtcttcgtgacatgcagacgaatcaacagttcaaaaggtgtaaagtgagttcaataactgcagaaaggcgattatgatgataactaaaatgactcaattcaatatgaaagacttcaataaaccaaacgaacctttcgttgtttcagggagaatcatcccttcatttgaaaacaatgtttggacatatacagaggagaaatttgctgaaccttatgtcaaaaaatatgacgatgaagacattgatgtcagttatgctgaagaagaggataaagttgtctttttttattacgcagagaacgactgtgtcggccggagtaagcttcgttctaattggaatggatacgcactgattgaagacattgccgttgcaaaagattatagaaaaaatggtgtcgggacggctttattacataaagcgattgagtgggcaaaggagaatcatttatgcggtcttatgcttgaaacacaagatattaatgtttcagcttgtcatttttatgccaaaaataactttgtcataggagcggtcgatacaatgctttattccaatttttcaacagcaaatgaaattgcggttttttggtactgtaaattttaaatataacagtatttgatgtttcgtcatttagcgggtgtgtgccgcaaagtattcaaaacatcggcttgaggatttataataaggtatatcaatcaatgcagggggagttatgtatgaagtgcaaaaaaatgaacagggtacaattaaaagagggaagcgtatcaatggccctataaactgcgtctgccctcattaatggagggaaatttgtgaatacgccttattcacagtcagctttacggcacaaccaagtgttcatttggctttgtgttttgtcatttttcagcgtattaaatgaaatggttttgaacgtctcgttacctgatatcgccaacgattttcataaactgccagcgagtgcaaactgggtgaacacggcttttatgttaacattttccatcggaactgctctgtatgggaagttatcagatcagctgggcatcaaaaaactgctcctatttggaattatggtaaatggcttcggatcgatcattggatttgtcggacactctttctttcctgtactcattctggcccgatttattcaaggggctggtgcagccgcattcccggctcttgtgatggttgcagtagtacgctatattccgaaagaaaacaggggtaaagcatttggtctgatcgggtcgctggtggcaatgggggaaggtgtcggaccagctatcggcggaatgatcgctcattatattcactggtcatatttgctgcttattccgacagcaacagttatcaccgttccattcctgatgaaactgctggaaaaggaagaaagaatcagcgggcgctttgatatgacggggattatattaatgtctgcaggcaccgtattttttctgctgtttacaacgtcatatagaatgtcttttctgatcatcagtattctggctttcctgatatttgtgaaacatattaggaaaactcaagatccctttgttgaccctgcactggggaaaaatgttttgtttatgacgggcgtccttagcggaggcctgatattcggcactgctgcaggatttgtgtctatggttccttatatgatgaaagatgttcaccatttaagtactgcggcaattggaagcgggattatgttccccgggacgatgagcgtcatcatcttcggttacattggaggattgcttgttgatcggaaaggttctttgtgtgtgctgaccattgggattgtattgatgtcttccagctttttaatcgctgcctttttcatagatgcggcaccttggcttatgaccgtcataatcgtttttgtgtttggggggctctccttcacaaaaacggttatatctacaattgtgtctggcagtttgaaacaaaaggaagccggcgccggaatgagtctgcttaattttacgagctttttatcagagggaacgggtatttcgattgcaggcggtttattatcgatcagcttgctgaatcaaaggctgctgcctgttaacgatgatcattccgcttatttgtacagtaatatgctcattctttttacaggaatcgttgttatgagctggctggtaaccatgaatgtctataaacgttcgcgaagaaatgactaaaaagggaaaaggatcaaacttgataaaagttttgatcctttttttaaggagcttccttattacggaaccttttgccgatcaatgaaaggggcgttaaagtgaattacatttataagaaaaaggaaaagaaaaatggaaaattgtatcatttcaatcagagataaatgggagaatgcacttattgagtctgaacaaaaaaataatcgtaatcaattaccgtaacgagaaaacaaccaagttttcactgccaatcgagacttttgaaaaagtgtatgaggatattaaaataggccggagagaaagttaatcactgtttgaaaatgactatgaagttcgtaagcggtatggttttaaccgcatctggattcccctggcaaagtaaaggtctttagggatttatgtcaaaataatagtaagtaccttatgcaacagggagtttggttgcttcataaggaggggaagtatgaaaaataagattcacatattgggagcctctggtgtcggaacgtcaacattgggtgttgcattatcaaagcatttgccgcatacgcatcttgatactgatgattactattggacagataaattcactaaaaaaagagaaatcgctgaaagaagaaagttacttaaaaaagacttgacaataaatgagaaatggattctttctggcgcagtgtgccgctggggcgatgatctaaaaagttattttgaccttgtcatcttcttatggattccgcaggatatacggcttgagagattaaggcatagggaatttcagcgttatggaaacgaagtgttagccggcggcagtaaatatgaacaatcaaaaacatttttagagtgggcttctttatatgatcattccggaatggaagttagaagcaaagctttacacgaacattggatgtcggatttatcttgtccattgttaaaaattgaaggagattactcagtcaatgaaagagttgatcgtgtcttggattatctgaattctaattaaactaacggatggagataactgcaaaatccaaaagtcaaagacagttccggccattttaacggagctgttttttataccgccttcagtttgtctgttgtgaagtgatttattctcggaaagaagcagcggaattaatagagaactcacttcgggaaaccgtgaaggcaggaatcaaaacgggagacttggcggtcaatcatcaacgtcagactttgcagaagaattgcagaaatgatcggatgttaaggcggaaaataagaagtgagaagcagatcatcaaaacgcaatacacctcaatttatattttcagtaagatcggctctgctcattaaaaaactcaattcgaagattagcggcatcaatattgccgcagatggggttagtgacataaagaggaagggataagaccccttccttaaaacctttaattcctctaatttcattgtcagatatattccttttttgaaatgggtatccaaatttcacttttaaaagatggcgatgttacatccttatgctcgttccacaggatttctgggccttcaatttgttcataatgtgacgatggaaaccattcggaataaatccgcccccatacttcctgcagtgcatccggaaatgatccggctgcttcgaatacagcccatgttgaggcagggacttcaagctgtgataggtgatttgggcaatgtttcgttgtggctgcgccaatatagtgatcaagctctccgttttcctctgtcctgccttcagaaaagttcgtggatgcactgatgagtcctgcaggcgctgtattagaaagctcttttagttgtttgattgctgcttcatctaaactttcccacatcgatgcaatgtcaggattcacgcctttgaacaaaatagggactctttttttaatgccgacgatgcgaaatgcctctttttcttcaatgcgatagttcatttcatttcctcctttgattgataactggaaggtcattcgcggataagctttaagtgaatggccattatgtttaacttctgatgggtttatgccatgcagattttgaaatgctcgtgcaaaagaatctggtgagtgataaccgtattttattgcaagatcaatcacctttacgcggctgtctttaagttcaaaagctgcaagagtaagacgtctgcggcgaatatattccgataatgaaatacctgtaaggaaggaaaacatccttttaaaatgatattcagagcagaaagcaagccttgctgcttctttgaaatcaatagcgttcgtgaggttttcttcaatatacgttaatgcgctgttcatccttttaagcgaatccatttatttgacctcctttaacaaaagaataacaggagcgaaatgtatctgcccgacatttcgtgcacagttttgcaggataacttatatgtaataaattaagttactcacctgtatttgtacagataaagaaaacacctaataactgcttgggtttcataagatgaaagaaagttatcattgttttatattgaaaagaaaatagaaaaagacggagttttcttgcgggaggggtttactatcaatcaattgaaagctgcatacgcggaggcagttaaaaaattttagttgatgtcgagaacgatgttcatcttcactgcttgttcaattagaggaagtgattcttccttaagggagatcactttttttattcgactaaagcagcagtttagcggaagaaggagaaaaatcagttgacttacttgaatactgaataggtgtaaaaagtggttattcatacggattgaaaaagaagaacacgcagcagactcacttgctcttgtttggggcaagtgttgacaaccctattagctggtttaattaaagaaggggtataaaacctgtatcaatgatgttactagatatctgcgacacaggttttatatttagctaaaatattcttatatattccacattgcatttttttattatgcaatagttcactctatttctgctttcaatttttcgaaccactctaaattaaccaagtgatgtgaacgggaattttcattcatacggcgaaagtaattgattgtgccgggaatttcttgagtgatggacaggtattcatcaaggagctcgattcgagttttagtctgatcgatttgtgattggatcagttccagtaatttatttttgtcgaattcatcggcaaagagtaacgccccataaaattgcaggttcacatattccgatttggtgccgtatttgatcattaatttttcaaattctgcccttcccgaatctgtgactttaaagttacggatttcacgcccgctggttgagggtttctgctgaatctgttcaatcaaacacttttcttcaagttgctgcagattgtaataaaatgaacctttcgtgaagttaacaatgtatttgtaatgacgtttttccattaaggccagaagttcatagccgtgagctccggggttttggatgagcaagccaaggataagtaagggaatcatggtttcatcaccttctccatccgcgcctcaaattccgcgtacgtgattttacccgaagccaaatccatactatgaaggtaaatctgttctgttttagaatagtcacccttcactttcagtgattgctcctctcccgaaatgggtttcaggatatggtgctttttcgagaaagcctcgaaatagcggtaaccgaatttgcgttgtgaagctgcgtctaaatgaatgccatcaggattcgcagtcaaacctgcagcagtaacaaaataacaattctgttgttcattagcaaaacgcagcaattgttcattaacctgtcgaaattcagtcgcgtgctgtccaaaaccggtcttcccaagaaagtcaccaagccctccaataatcaacggtacatcatcaagtttcaactcgtttcttagcgtctcaatgataagagttaatttctcgtaataagtttcatgcagcgaacgataactgtcactctcaccttggtgccaaaggattccgcaaatttgactggaacggagggcgaagcgggcttcggacaaagcatgctgaaaaaggatgccttccggatgccagtcattcaatgaactgccgccttccgcacaagggatcaagccaatttcttcatcgggatgagctttcgaccaagcatctgcaaaagatgccgccaagccaacgccggaaaccggacggtcgtaattaatcggctctgtcatcatctgccactgtccattgcgcagcatttttattttttcattatagatagggtctacttcattcaaaaatccacggcccgccatattcgactgccccaacattaaaaaagactttatcatttaatttttcacttctttacatcaatattttagtctaattagactatagtcaattcagcttgtcttgtaaagttctaataaggttttacttttattagtagtatgtatgaaaagcaaactaacattgaaaatttggtggatgtatttgagaaatagcaagttcttttgctttagatcttgataaacaatgaaaaacaacaaaaatcctgtcatgtaagggttcctatgaggttcaaaatcattaaaaaggttaacgattgtaccaattctattcatttgttatgttttacttttaaatcctgaagttatacttgaagaggaatgtcctaaaatgcagaaaaagccgggatgtcagatccggcttttcgctcactttcctttcttcttccgcttctccttttccgcccggtaaaactcatgaaacatcttcatcaatgcgcgtttttcaatccgcgacacgtaactccttgaaatgccgagctcctttgcgatctcgcgctgcgttttttctttttttagatcaagcccgaagcggccgacgatgacttctttttcgcggtcgtctaaaatatcgatatattttttgaccttttcaagttccatgttgagctgaatggtgtcgatcacatcctcgctttccgacttgaggacatcgatcaggcttatttcattcccttctttatcctggccgatcggatcatgaagggagacgtcttttttcgtttttttcaatgcgcgcagatgcattaaaatctcattttcaatacatcgtgcggcatatgtggcaagcttcgtgccttttccggctgagtagctttcaattcctttgatcagcccgattgtaccgatggagatcagatcttctgcgtcctctcccgtattttcgaattttttcacaatatgggcgactaaacggagattgtgttcgatcagcatgttgcgggcatgttcatcgccttcagccataaggtctaagtattttttctcctcactatttgagagcggttgtggaaaggcattatttttcacgtatgatactaaaaacacgagttctttcacaataaacccgagcgctgcaaaaacacctgtcaccatcctcacctccacaaagttatgtaggcaaaagcctatatgtaactgtatgtggcagtcaggctgtttgtgtctgtacagggaaattaatcaaaggcaggttttatttcttacagcctcttgatttttgctgattgagcctgtatattgttaaaaaaagtaagggtgaaaagaatataacgaaaagcgctgaagagacgagtagacagatatcattcatgacagagagctccgggagctgtgaaggagtatgaatggatgtgttgaaacaaacctcttagcttcgcatcggaatcatgaaaaacgaggatgatgcggcggatactcctgttaccgagtaagttttgtacccggcaagaggccggcaccaaaccgaattgaggtggcatagcgggctgtttcccgtcctcaagactttattgtcttgagggcgttttttatttctaagggagggataagatgaaaaacctgaagtcttggcggtacccgatgcttctgttaaccggaatcgggatagcaaatattggtgaatggatttattttttgtctcttaatcttattgttttaaaagaaacggggtctgcttttgcggtttccatcctttatttaatcaggcctgcggctgttttgatgacaaatgggtgggcgggcagcatcatcgacaggtgtaacaaacggaatatgatgatgtcgcttgatttcatccgggctgcattcattgccgttctgccgctgatgtttactgtaaggtctttgttttccatttattgtatcgtgtttttgattcaaatggccaatgcgatgtttcgtccgtgttccatggcgtatgtgacgatgcttattccggctgaaaggagaaaacgattcaattcactaagggctttgtcggaatcaggggcttttctcctcgggccggctgcggccgggctgctttttatcgccggcacgccgatttttgcgatttgggtgaatgcggcggctttagtgctgtccggtttcatcacgatgatgctgccgagccttgaaaatgagcctcacgtacattctcccagacagaagctttctttggcagtgtgcaaagaagattggaagctcgtctatcgcttcagccgaacggcgcgaaacgtcatgatcatttattttttattcagtctggtcatgaccgttatgccatccgcgcttgattcgcttgaagccgctttttcaaaagaagttcttcagctgactgatgccgattacggttttcttgtcagtgtctcaggggcaggcattattgcgggggcgcttgtcaatgtaatctttaataaaaaaatgccggcttctttattgatgggaatgggctctttattcacagcggccggatatatgatttatgcgttttctgacgttttttggacggctgctttcggatttttccttctcgctttttttctggcgtttgccaatacaggctttctgacgttttatcaaaagaatgttccggtggacatcatggggagagtggggagcttttattcattagtcgaagccgtcttcattatattggtaacggcggttttcggagcggcggctgtcggttcttccgtccgcgtcatcgtcatcgcaggggctgctgttatgctggcgttggcagccgttttatgctcgttcttatttgcggcctcaaaaaggaggactcccgatgtgtttcaagcggatcaatttaaagaaacataaagagacggccgtttcatttcgtgaggatgagtatctcaggtggctgtcatcccaaatctaatgctcacccgacaattttaagctgcttcttcataacgggcagccgatcggacagcttgaagcttccatcaacttttaccgcagccaaaaaatcggttatgtgcacctttactgagcagcaaagagaacgcggaacgaagctgcatcaatttagaattaaacggaaaagttctcagaatgagaggagccgtaccgccggaataggaggcggtacgcgcttcattttttcgttgtttttaaaagaccgggaaacttcttataaatgaccgccattaagacgagcatatacattccgtaaatcccgaaagacagcagtttgttgcttgtaaatgaagcgcctgcgacggtcacgatcacaatgttcggaattttgccgagcaccgacgcagaaaaaaagatcggccatcgtatgttactcagcccgcagacggtattcatggcaagcgacggtataatcggaatcagccgcccgaaaagcaccgccgtaaacgcgtgctgatgaaatgaaccttcatattgagccgcggccgggtaagccaccagtttttttctggcccagtctctgaatccgtaccggacgagaaaaaacaatgccattgttccgagcattgcgcctgacaatgtaatccacactccgtttacaatcccgaaaaccgctccgtttaaggccgcgataatggcgaatggaacgatcggaaaaaatacgtcagctgcgaccagaaggatactcataagcacggcatacatgccgcccgcgcgaatcatgctgagccagacgtctttttgcataaagccgatcatcacgacagcaatgatgacggcaagactgaatcccttttttatcatctgtacgttcacctcttttcaattagtatacagcacaaatctatctccttctattaaaataagctgtccgataagcgtacttgtttatcagcatttgccgtttgatgagaaacggctggcagccgggtttggacaaaaacatgcgggaagcgggtgatgtgcatcatttgatgcagagaatgattttatacaaaaggggacacgttaacagtagtgtttactggaggtgtaaacgttgagatgctttcatctgatcatcatgatatgcgtcctcacgggtctcactgccgtgtccgccgatgcgaaatctttaaaaagaagtgacatggagaagacgggaaacgtgtactgggatataaggtctgaaaaaaagaagctatctttaaccttcgatgacggcccccatcctgtctatacggaggctgtgttagacgtgctgaaacagcacaatgttaaagcaacctttttttgtatcgggagccgtatagacaaataccccgtaacggcaaaacgcatcgttgaagaagggcatgaaatcggcaaccatacgatgaaccatgtttattttcaccgtttaaaacgcaaagacattttacaagagcttcacagctccgcgcatcatatcagatcgctgcagccggaaggggacaagttattccgcccgccgggagggtcgctgaatcatacggctttcaaaagcctcttaaaagagggctatcatatcatcatgtggtcatggaaccaagatccgagggactggaaaaggcccggaaaaggaaaaatcgtcaggcacgttgtttcacatgccagagatggagatatcgttcttctgcatgacggcggaggaaaccggcgccagacggttgaggctttgaaagaaatcattccccagctgaaaaagcagggctacacgtttgttaaggtttcggatttgatcggacaggattccggtccttttcatatccagtaaagagagcgccgcgttgaaagccgccaaagagatgtgtaccataggaggtaaggtttggggggagagaaaatgaagtttgctgttctttttattacgataacctgtctgttatcaggatgcgctgcgggcaaagagaaaagtgttgtcgcgttcggcgacagcaatacgcgcggttccaactgggattatcgtgattatccgaaggcgcagcagtgggtaaacattttaaaaacagcggaacgcggccgtcttacggttataaatgcgggaataggcggccagacgactgaggatgcgcgcctgcgctttcaaagcgacgtgctggagcgtaagccccaatatttatttatcatgttcggaacaaatgatgcgggcattttgacgggagatcagccgcgagtatcaaagaaacggtttaaagaaaacctgacttatttcataaacgaaagcagaaatcacggcataaagccgattttaatgacgtgcatcccggttatagaaggaaacggaacgcatcatctctattactattcgagatataaagcctcagcctttaaagaaaaaggcggcgcgagaacatggcataattcctataacggcgttacgaggcaggttgcagctgagttgaaagtgccgctggtggataactggaaacactttatacgcgcggacggcggcaaagatacagaccgggcgctgatccaatccggactgatagatccctccggaaatcatatgacgccaaaaggcgccagaatcttaattgaaggcataaaaaatgggcgggttttggaacgctgacgccgtcagctgcctaaaccgttttgcttctgcttcataggctgtagaaaaaacatcttttggaggcgattgctatgaaccgcggtttccctccgcaatatcctgtatgcccgcctcctcgggtgaatgcggggtactggtacgcattttttgttgtgctgctcgtcgtcattctcgttctgggcggtctgtattggttcaatatatagcagccgtcctcttaaacacctctattttaggggtgttttttgttgaaagtggtagtaatgcgcataaccgaagtgatataatatcagtcatctgagtaaaaaaaggaaattcgcccgggaattttttctgtttaagaagaaacggaaataatgtgtccgagcgatcttcttttgatttcgttttcaattaactcgataaattcacggctcaaattcatttcattggctttgaaataagattctattagtaattcatcagaaagctttctcatgccggggacccaattaatgggagtggcacctccttacaattgtaatcaatcatcagacgcaagcatatgatggaaggttgcgtttcaatcatggtgaggttatctttaatctaccatgaaatacaaataagaacaatcgttctgttatccacactcgtaagtggataacttgttagtatcttgtttataatctggataaatccggatgtaataagagtggataatgtgtgtaattttatccacaactggtgaagaaacccaatttttgtcgaaatttttttaccgagtccgactttgtttttaaatctgacagatttcgacatatagatgatagaaagaaaaggaagggtgcgggttttgttaaaaaagttttttttacctgacgaatttgtgaaaaatatatttcatatcacaccggaaaagctcaaggaacgcaatgtgaaagggattattacagaccttgacaacacgcttgtggagtgggacagaccgagtgcgacacctcgattaatcgagtggtttgaagaaatgaaggagcacggcattaaagtcacgatcgtctccaataataatgaacgaagagtgaaattattctcggagccgcttggcataccgtttatttataaggcaagaaaaccgatggggcgcgcctttaaaagagctgtcagcagcatggagctgaaaaaagaagactgtgtggtcatcggcgatcagctgcttactgatgttctcggcggaaacagaaacgggtatcatacgatcctcgtcgtgcctgtcgcttcctctgacggagtcatgacgcgctttaaccgccggattgaacggagaatattgagttctttgaaacgtaaaggccatattcagtgggaggattaggaatggaaaaggttgtttgcatcggctgcggagtaacgatccagaccgaggataaacaaggtctcggatacgcgccaaaggcatcgctcacgaaggagaatgtcatttgtcagcgctgcttcagactgaaaaattacaatgaaattcaagatgtttcattaacggatgatgactttttaaatatcttgcacacaatcggcgatactgactctctaattgtcaaagtcgttgatatttttgattttaacggaagctggataaatgggctgaaccgctttgtcggcggtaatccgatcattcttgtcggtaataaggccgatatcctgccgaaatccgtaaagcgggaacggctcgtccaatggatgaaacgcgaagcgaaagaatacggcttaaaaccccttgatgtctttttaatcagcgcttcccgcggacaagggatgaaggaagtcattgacgccattgaacattaccgcgaagggcgggatgtgtatgtggtggggtgtaccaatgtcggcaaatccacatttatcaaccggattattaaagaggtctcaggggaagagaatattattaccacctctcaatttccgggcacgacgcttgatgcgattgaaatcccgcttgatgacggatctgcgctttatgatacgccgggaatcattaaccatcaccagatggcgcattacgtggacaagcgtgacttaaaggtgctgacaccgaaaaaagaactgaagccgcgcacttttcagctgaatgaaaaacaaacgctttatttcggcgggcttgcccggtttgactatgtatcaggcgataaaacggcgtttgtctgctatatgccgaatgaattgatgattcacagaacaaagcttgaaaatgctgatgccttatacgaaaagcatgcgggagaactgcttaccccgcccggaaaagatcatttggatgaatttccggagcttacggcccacacgtttacgattaaagaaggaaagacggatatcgttttttccggactcggctgggtcacggtgcagcaagcagataaaaaaataacggcatacgctccgaaaggcgtacacgtatttgtccgccgttcattaatatagagagaaggggagagggagcatgaaacaattgtacggagtaatcggaaatccgatcgggcattcaatgtcacccgatattcataacgcggctttgcaagataagaacatcaacgggcagtattttgcgtttcaggtggaacctcattatctcaaggacgccgttaacggaatcaaggcgcttggcatctgcggagtgaacgtcacagtcccgcataaagtcgcgatcatggagcatctggatgaaatacatgaaagcgcgaaagtactcggggccgtaaataccgtcaaaagagagggagacaggctcatcgggtataatactgacggagatgggttttataaatccttagtcaaagtattggacaaaccgatatcagagctctccatcctcatgattggggcgggaggggcggcaagagcgatttttacgacgatcgtccgcagagagccgaaacaatttgacgtttgcaaccgcacgccggaaaaagcggaaagtctgattgcggctgctccctcttttcagcagaaacgcgcccttactttaaaagaagctgaaaatcagcttgaacaatatgacgtcattattcatacaacatctgtcggcatgtatccgaaaacggatgccgtgccgctctcattggaacgggccaaaacgggcgccatcgtttgtgatatcgtatacaacccgattcaaacggcgttcttaaaagaagctgaaaaaagaggtttaacaacccttgacggtgtcggcatgtttgtggaacaggctgcactgtctttcaagctgtggacggaacaagagcctgacagcggcttaatgagagcaattgttgaaggaaaactaggaggaacacaatgttaacaggaaaacaaaaacggtttttgcgttcaaaagcgcatcatttaacgcctatttttcaagtgggaaaaggcggagtcaacgaaaacatggtgaaacagattgcagaggctttagaagcaagagagctgattaaagtcagcgtgcttcaaaactgcgaagacgataaaaacgatgtcgcagaagcgcttgtgaaaggcagccgctcacaattggtgcagacgatcggaaatacgatcgtattgtataaggaatcaaaggaaaataaacaaatcgagcttccgtaaggtggttgacatgaagaaaatcggaatattcgggggcacatttgaccctccgcacaacggacatcttctgatggctaatgaagtccttcatcaggcggagctcgatgagatttggtttatgcccaataaaatcccgccgcataagcagaatgaagactttacagacagccggcaccgggtggagatgctgaagcttgccatcagctctaattccttctttaagcttgagcttgcggaaatggaccggaaaggcccttcttatacctatgataccgtccgtttactgaaggagcggcacccgaacgacaagcttttctttattatcggggcggatatgattgaatatctgccgaaatggtacaaactggacgaactgctcacgctcattcaatttatcggagtgcggcgcccagggtatcatatcgagaccccgtacccgctgctttttgccgacgttccggaatttgacgtttcgtcaacgatgcttagagaacgtctcaaagcaaaaaagccgacgcaatacttaatgccggataaagtgaggcagtatatagaggagaatgatttatatgaatcgtgaggaagcacttgcctgcgtcaaagaacagctgaccgagcatcgctacatccacacaatcggcgtgacagatacggcggttattctcgcaggccggttcggagcagatccgaaaaaagcggaaatggcggctatttttcatgattatgcgaaattccggccgaaagaagaaatgaagcagatcatcgtgcgggaaaaaatgcctgctgagctcttggattacaatgccgagctgtggcatgcccctgtgggagcgtatttggctgagaaagaagcggggatcactgatcccgaggtcttggatgcaatccgctatcacacgtcagggcgtcccggaatgacccttttagacaaagtcatctacgttgcggattacattgaacccggccgccattttcccggagtggaagaggtgcgccgtctggcggaaacagatctgaacgaagcgctcatacaagcgatgaaaaatacaatgatatttctgatgaaaaaaaaccagccggtctttccggagacgtttgcaacctataactggctggtgtctcaaaaacgacaggaggaatatggaaaatgaatcaagcttccgtattaaaaatcgcggcaaaagcatgcgacgataaacgtgcagaagatattttagcgctggacatggaaggaatctcacttgtagcggattactttttaatctgccacgggaattctgataaacaggttcaggccattgcgcgcgaaattaaagatcaggcagaagaaaacggcattgatgtcaaaaagatggaagggtttgatgaggcccgctgggttttagttgatctcggcgacgtcattgtccacgttttccataaagatgaaagaagctactataatcttgaaaagctatggggcgacgcgccgctcgcagagcttgaactcggcttgaactcatgatttaccaaggcttcgccggtgtatatgacgagttaatgtcccatgcgccgtatgatgaatgggcgggctggatcgaagcgtctcttccggaaaagggaagggtgcttgatcttgcctgcggaaccggagaaatatccatcaggcttgctgaaaaaggctgcgaagtcacggggattgatttgagtgaagatatgctgagctgtgcccagcagaaaaaaacaggaaagccgattctttttctccagcaggatatgagagagctttccggttttgaagaacagtttgatgccgtagtcatctgctgtgattccctaaattacttaaaaacgaaaaatgatgtcttaagcaccttcaaaagtgtttttcaagttttgaaggagggcggcctgcttctgtttgacgtccattccccgtataaaatgacggagctttttccggacagcacccatgcggatcaggatgagcagatcagctatatctggcaaagctttgccggcgatgaagagctttctgtcatccatgatatgtcctttttcgtatggaacggacaatcttatgaccgctatgacgagacgcatgagcaaaaaacattttacattgaagaatataaacaaatgcttgcagagaccggatttgaattgaagaaagtgacggctgattttacagaccggcctccttcaacagagtctgaacgtcttttctttacggcaggcaaaccaaaaaccatcgtttaaacggaacgatggtttttaaaatgcattttttgcgattggcgtgataaagctctttatggcatactcagttacacgtgaaattgcttcttcactaacgatatatcttcatcgtatttgtcatgtgtacgctgaaagacacgattgaacatatcctgaacaccgctttcgagagccttcagtccttctccggtgacgccgccttttacgcatactttttcctgcaaggcgggaagcgtgtaatgccccgtttcaagaagctttccgagaccgacaagcatttctgtcgacataatcacggcttcttctttggtgatgtccgtttcttccactgccgcgtcaataaagcgctgaacgagataactcataaaagcgggcccgcagctgacaatgtctgacgccgctcttgtaataccgctgctgatttccacaggttttgaaatatgagtgaacagcgtttgaatatccgcttttgcagactcgctgcagcttttgccgaacgtaacaagcgagacgccggccaaggcgcggttcgtaatgctcggaatgacgcgggccgtctgacacggaaccgtatgttcaatctgatccgtctgaacggggctggtaatggagattaaaatgtgatctttccgtaaatgcggtgtgagttttttcagcaaaggatatatatccagcggttttacacaaatgaatatgatttcattatcctgtacgagcttttcctgatcctcggtgacgtggatgccgctgaaacgttcttttagttttaatgctttttcgattgttctgtttgtgatggtgatatgtgagggatcggcagcgtttgattcgataaacgattcaatcaggatcgttcccatgtttccggtgccgataaagcctattttcaatgaattcccctcctttttcccttaatcctctaaaccttatgcggggaggcaatgcaatatgacgaaagcgatgatgacggagcggatgcggcggaacctgaaaattctgggcgcttgtcttgcggcaggtgcggtttttatctgtatttggctgtttcgttctgaaaaggaagagccggtcaaacagcagtccgtgctcggtcaaacagcctccgcatccgtcgcggacaaaaaagacaccgcagacgataagattatgattgatgtgaaaggagcggtccgaaatcccggcgtgtatgaaatgaaagcgggagacagagtgacgcaagccattgaaaaagccggcggcctgaagaaaaaggcggatgaattgaatgttaatttagcagagcagctgcaggacgggacgattgtttatattccgagtgaaggcgaagaggagaatcgcccgaaaacagcagttggtgaaaaggagaatgcagctgtcaatatcaatacggcatctctggacgaacttcaggcgatttccggggtggggcagaaaaaagcggaagctattatcgcctaccgagaagaaaacggacggtttcagactgctgaagatttgatgaatgtatcaggctttggagaaaagtcatttgagcggataaaaacttccattacggtaaagtgaattgacggttctgcttaaatctatgtaaacttagaaaagcaacaagactttttggagggaacacttgtggaacgaatctcatggaatcaatattttatggcgcaaagccatttgctggcgctgagaagcacatgtccgagactgtcagtcggggcaaccgtagtcagagataagcggatgattgctggcggatacaacggctcaatcgccggcggcgtccattgcgctgatgaaggatgccttttaatagataatcattgccagaggaccatacatgcagagatgaatgcgattctgcaatgttctaagttcggtgttccgacggagggcgcggaaatttatgtgacgcattatccttgtattcaatgctgcaaatcaattatccaggcaggcatcaaaacggtctattatgccgaagattacaaaacacagccttatgcaaaagagctgttcagccaagccggagtcaaggtggagcaggtcgaacttgatgaaatgatcatcgatctgaaaaaccgcgaaaaattgtcttttgtcgcaggtctgattcagcaattatctgatgcgggagttaaggcagatgaactgaaaaaaattcatgaacaggccaatgagctgtttaccagttacgtataaatgaaatataaataccttcttctgcctctggcggcggtttctgcaactgcggggattgccgccgctcatgtcttctgggttctgctcctttttcttctgtatcttctctttattatgataaaaacaaagcagcctgctccggttatcatctgcctcgtttctttttgtgtttatttctttctttatacggtttgtgacgctgtgaatgtaacgcggtatcaggccggcagttatactgaacaggccgtcatcactaatattccgaaggttgacggagcgaaaatgtcagccgttatccgtacacatgacaaggaaaaatgggcggcttcgtacaaaatccggtctcttgaagaaaagagacgcattgaacagcttgaaccggggatgcgctgcacatttacaggctctctggaacagcctgcacatgcgacgattcccgggggttttgattataaggaatatctttactctcagcagattcactggttatttaccgtgacttccattcagcagtgtgaaaaatccaaacagccgctgtttaaactgctgagcatcagaaaaaatttgatttcgatcattcggaatcacgtgcctgaatcttccgccggaattgttgaagcgctgaccttaggtgaaagattttctatagaagacgatatactgagtgcatatcaaaatttgggagtcgttcatttaatggcgatttccggaatgcatgtcggtcttataacggcgggattattttatgctctgatcagaatcgggctgacaagagaaaaggcggggatattgctgctgctgtttttaccggtgtatacgctgctgagcggtgccgccccatccgtattgcgcgcatccctcatgctgggattttatatcgccggaactcttgttaaacgcggcattcattcctctgctgcattgtctctgtcttatctgctgctcctgctgtttaatccttacctcctttggcaggcgggcttccagctttcctttgcggtaagcgcctctttaattctgtcatcctccattttaaagaaagcagggaaaagcagacttgccgggcttgcgatggcttcattcattgcagagctcagctcacttccgtttcttctctatcattttcagcaaatttcacttgccagttttccgatgaatatggtgatggtgccattttatacgttatttgtcattccggtttctgtcatcggtttccttcttcttttactttcaaggcagatgggagaatgtttgtttaatatgtttgaccttgtgatgaagcctgtgcatgatttcattacatatgcggcatccgttgatttatttactatgattgtgttaaagcctgactttctttcccttcttctgcttgcggtttccgtttttacgctttttgcggctttagaaaagggaggttttttaaaactcaggaaatcggctctttttttctgcgcggttttggcttatttaatatgccgtccgtatttcagcccatggggagaagcggatatgcttgatatcgggcagggagactcgctgtttataaacgcgccgcaccgcaaagggaccgtaatggttgatacagggggagtgattgcttatcccggagaatcatggaaagaaaaacgccacccgtattctatcggcgagaaggttttgattccgtttttaaacggaaaaggggtgaaaaagctggatgcgctgattttaacccatgcggatcaggatcacatcggggaagccggagtgttaatcaaaaatcatagagtcaaacggttaattgtccccgtgggattcgtaaaagaaccgaaggatcagaacatattaaatatggcgaaagaaaacaacattcccgttgccgaagcaaagcggggcgacaccattacagccggtgatcttcagtttcaggtgctgtctccggagtcgtctgacggaaagagtaaaaatgattcgtcactggtgctttggacggttttaggcggagtgagctggcttttgacgggagatttagaatcggacggcgaaacagaagtgctgaaaacgtatccgaaactgaaggctgatatattgaaggcgggtcatcacggcagcaaaagctcaacgagtgaagcctttttgaaacagcttcagccggaagcagcgctgatttcagcaggaaaagagaatcgataccatcatccgcacgaagaagtgctggatcgtttgaaggcgtactctgtcaatgtgcttcgcaccgatatcagcggaacgattcaatacagatttgaaaaaggcgccggaacgttttccgtcttccctccatatgatatagaagaaaccagggcgcaagaagtaaaaaagactgccgattgacagcagcccggaatgcggctaagagccgataagatggatggctgttgccatcacgaacaaaaaggcgaaaaatccgaaggacacgacaaaaccgacagctgagtcaacagcatcatttcgtttgctttgaacgtttttttcaaaatcattcaatttcatccctcctgacttccctaagtatactggaattgttttgaaaaatctagaagtgatggtaacgttttctgttcttgtgattatcgcctttttacaagcagacccgggagcttgtgaatcaggcgtttattataaatgaggaagctgtcctttttaaagcttcctctttactatttgccgaactcaatttaggatagaaggggatcaagaaagagaggaagtcatacgatcatggtatttgatgtttggaaagccctgaaaaaaggggatgtccgctccgtttattgcttatacggaaaagaaacgtatctgctccaagagactgtcagccggatcagacaagctgtcgttgatgaggagactaaagattttaacctgtctgtttttgatcttgaagaggatccgcttgaccaggccataaccgatgcggaaacgtttccgtttatgggagagaagcggctggttatcgtaaaaaatccgtcttttttaacaggggaaaaaaagaaagaaaaaatagagcataatacaagcgctttggagacttacctgaaggagcctgcgccttatacggtctttgtgattgtggctccgtatgaaaagctggacgaacggaaaaagctgacgaaagcgctgaagcaaaaagcccttatgattgaagctaaggagctgaatgcaaaggagacgactgattttacgattaatctggcgaaatccgaaaataaaacgatggatacagaagctgccgagcatttggttctgcttgcaaacggccatctgtcttccatatatcaggaaatacaaaaactctccgcctacaccggtgacagacatgagatcacgcttgaagatgtccgggagcttgtcgcaagaagtttggagcagaatatttttgagctgatcaacaaaatcgtgaaccgaaaacggacggaaagtcttcaaatattttatgatcttttaaaacaaaacgaagaaccgatcaaaattatggcgctgatcgccaaccaattccgtctgattatgcagacaaagtattttgcgggacaaggatacggccaaaagcaaatcgcttccaacttaaaggtgcaccccttccgggtaaagctggcgatggatcaggcgaggctattttctgaagaagagctgcggcgtattatagaaaggctcgcagtaatggattatgaaatgaaaacggggaaaaaggacaagcagctcttgctggagctctttctccttgagcttctccggactgaatgaaaaaaacgatccccgttaaagggatcgtttttgtattatgcagaaagtccgttcacttgtttcgcaagtctagatttgtatcgagctgcggcatttttgtgtacaagacctgttttcactgctttatcaatgcgtttcgctgcttcagaaagagcagttttcgctttatccgcttcgttgttagcaacagaagcttcaacttgtttgattgcagtacgcatagcagatttgattgtcgcgttatgagcgcggcgttcgttgtttgtttttgtacgtttaatcgctgatttaatgtttggcatgtgtttcacctcctaagatacaacctgtagcacagtgtcttaaggttaaatcttcttcacaatagaacaaattgtattctatcaaacagaactttagattgcaatataaatgtaaagtatttttcgttgatgggtaaattcgcatgattcgttttgtaaatggccacactatgtaccacgatgattgaaggaggtctttcctgtgaaaaacaacgaactggatgtcaatcaatttctgatacggacggatttagcggtagaaacgaaacaggcggtaaaagacggacaagccggtcagacaaaagaaataaacgggtttattgaaaaagaacgcgacaagggcggcattaaagtcagaaccgtcgatattaccaaagaaggcgccgagctatcggggaaaaagcagggacgctatgtcacgatcgaggctcaaggggttcgggaacacgactctgacatgcaggaaaaagtaacggaagtgtttgccgaggaattttccgcctatctgtcggcattaaagattccaaaggatgcaagctgtttgatcgtcggtctcggcaactggaatgtgacgccggatgcgctcggccctctcgtgaccgaaaaccttcttgtgacaaggcatctgttcaggcttcagccggaaaacgtgcaggaagggtacaggccggtcagcgcgcttgctcccggtgtgatgggattaacgggaattgaaacgagcgatattattcaaggtgtgatcaaagaatcaaagccggattttgtgattgcggtagatgctcttgcggcaagagccgttgaaagggtgaacacgaccatccaattttctgatacgggcattcacccgggatcaggcgtcggcaataaaagaaaagaattaagcaaggaaacgctcggcatccccgtcatcgcaatcggggtaccgactgtcgttgatgcggttacgatcgcgagcgatacggtggattatatattaaagcatttcggcagagagatgaaagatgacagcccgtcaagatctctggtgcccgccggaatgaacttcggcaaaaagaaggtgctgacagacgaagaccttcccggagaaaaagaacgccaatcctttctcggtattgtcggcacactggacgaaaacgaaaaacgccagctgattcacgaagtgctctctccgctcggccataatctgatggtcacaccgaaggagattgacacctttattgatgatatggcgaacgtgcttgcaaacgggttaaacaccgcccttcatgaaaaagtgtcacaagataacaaaggttcttataatcattaaaatggttctacctcctctagcttgttcatagagtaattactagacaagcgctggagggattcaaatcatgagaaaaaaacgcagaaaccgtcaaattgtcgttgcagtaaacggtggaaatgcgctcaagggcatgtttttgtttatgacaagccttatcgttattttcgtattatcgggtgtgctcacatcgcttcgccctgaactgaggctttcttcgaattctcttcacggaattgccggagaacttccgggtgacgcgtttgcacacctcctcggtatggaaaatcattatttcgcctcagagcttcctgaaaaagactcttttcagctgtcccggctttccttaaaactggcgacaagcattaatatggaagacccgcggagtttcttgggacgtgagctgccgggatttgcccaatacgatacggagatccttctggcggggcaggggactgattatacgaatatgcctgctgaatccccgccgccgtcaaaggtgatggaaaaagaaaaagaagtgaacctggcagaaatcgaaaacaaaacgaaaaaagaagaaaaggcgccgccgaaacattcaacaggcagcaaaaaagtcgtttttatttaccacactcataataccgaatcctatcttcctctgttaaaaggggaaacaaatccggataacgcccgccattcgaaggccaatgtcacgcttgtcggagatatgttcggaaaagcgcttgaagcgcaaggtgtaggagcgaccgtagataaaaccgacattcaggcccgcctgaacaaagacggtttaaattatgcgcgaagctacgacgaatcaaggccggtcgtaaaaagcgcgctcgccaaaaataaaaacctgcaatataccatagacattcaccgggattcccgccgcaagaaaaatacgacagccgacatcaaaggaaaaagctatgccagggtcgccatcgtcgtcggcaaaaaaagcgctaattttgaagaaaactataaactcgcaagtgaacttcataagctgatggagaaaaaatacccaggcttaagcgtcggtgttttatcaaaaggctctccgggagataatggagtgtacaaccaggatttaaacgatcggtcgcttctgctggaattcgggggcgtggataacaatcttgaagaactgaggcgcgcatcagatgccgtggccgatgtattcagcgaactgtactgggatgcagacaaggtcagctcgcaatcaggagagaagaaaaaacaatagaaatcaggtgatgcaaatgatccgttttaccggcaaatgcctgctgatcgccattgtcatgtttgtcggcgtattgttcggcatgcagcaggcaaacagcggaatgcttgatatgaaaggatacaaagatccctccttaaaaggagcattcacgctcggcggcggagaaggacaggaaaaagaagcttccattttggggcaaaccgttacggcgaaagatctggaagaaaaacaaaaacagctggaacaggcagaaaccttcaacctgttttcaaaagccggagaaaccctttcaaataccgtgacggactcggcacaggcgatgtatgagtgggtttcgaaactgaaccgttagcattgatgaagagaaaagcggatgattccttaaaggaagcttttctctttcttgttttaattgaatgtttacaatcctattgatataatctaagctagtgtattttgcgtttaatagtaggagtgatagattgtgacagataaagaaaagcgtttagagaggcagtcaagaatccggaatttctccatcatcgcccacatagaccacggcaaatcgaccttggcggatcggattttagaaaaaacatcggcgatcacccagcgggaaatgaaagaacaattgcttgattcaatggaccttgaacgcgaacggggaattaccatcaaattaaattccgttcagctgaaatacaaagcaaaagacggagaagaatatatattccatctcatcgacacgcccggacacgtcgactttacatatgaagtttcgcgaagcctggctgcctgtgaaggcgcgattctcgttgttgatgcggctcagggaatagaagcgcagacattggcgaacgtctatctggcgcttgataatgatcttgagattcttcctgtcattaataaaatcgatcttccgagcgcagagccagaacgtgtgcgtcaagaggttgaggacgttatcggccttgacgcttcagacgccgtcctcgcttcagcgaaagcgggcatcggcatcgaagacattttagaacagatcgtagaaaaagtgccggctcccgcgggagatccggaagctccgctgaaagcgctcatctttgactcgctttatgacgcgtaccgcggagtcgtcgcgtatatcagagtcgtagaaggaacggtcaaaccgggccagaaaattaaaatgatggcaaccggaaaagagtttgaagtcatcgaagtcggcgtcttcacgccgaaagcgcagccggctgacgaattgacagtcggtgacgtaggctatttgacagccgcaatcaaaaacgtcggcgacacccgtgtcggtgatacgatcacgagcgcggttaagcctgcggcagaagcgcttccgggctaccgcaaactcaatccgatggtatactgcggactttatccgattgacacagccaaatataatgatttgcgcgaagctctggaaaaacttgaattgaacgattcatctcttcaatacgaggcagagacgtcacaagccctcggcttcggtttccgctgcggctttttaggaatgcttcacatggaaatcattcaagagcggattgaacgggaatttaaaattgaccttattacgaccgcgccgagcgttatttatgacgtttatatgacggacggcgaaaagatcatcgtggataacccgtcaaacatgcctgacccgcagaaaatagagcgggtggaagaaccttatgtcaaagcgacgatgatggtaccgaacgattacgtcggagcggttatggagctttgtcaggggaaacggggcaactttatcgatatgcagtacttagacgccaaccgagtcagcattgtatatgagatgcctcttgcggaaatcgtatatgaattttttgatcagctgaaatccagcacgaaagggtacgcctctttcgattacgagctgatcggctacaaaccgtccaaactcgtcaaaatggacattatgctgaatgcagaaaaaattgatgcgctgtcgtttatcgtgcaccgcgattacgcatacgagcgcgggaaagtcatcgtcgaaaaattgaaagaattgatcccccgccagcaattcgaagtgcccgtgcaggcagcgatcggacagaaaatcgtggcccgctcaaccattaaggccatgcggaaaaacgtccttgcaaaatgttacggaggagacatctcgcggaaacggaagcttcttgaaaaacaaaaagaaggaaaacgccggatgaagcaggtcggctcggtagaagtgccgcaggaagcgtttatggccgttcttaaaatggatgacagcccgaaaaaataacggaagccgccgcagtcccgcgctgcggcttctttctgtaaagaagaaggtgtttcaaaatgaaatcagcttatattcatattccgttttgtgagcatatctgccactattgcgatttcaataaatattttattcagagccagcctgtcgataagtacttaaactcactcgaaaaggaaatgataaatacaatagaacggacgggacgccctgatctccgcacgattttcatcgggggaggcacgccgacatcgctctcacccgcccagctggaaaaattgatggattccattcaccgcgtgctggagccttctgacggactcgtagaatttgccgcggaagcgaatccggatgatttgtccccggaaaaattaaaaatcatgaaaaatgccggtgtcaatcggctgagcttcggtgttcaaacctttgaaggtgagcttttacaaaaaatcggcagagtgcataaacaaaaggacgtattcacttcctttgaacgtgcgagggctctcggctttgacaacatcagtctcgatttgatgttcggcctgccgggtcagacgctggccgatcttgacaattccgtcaaaacggctttgtctcttgatgcggagcactattccgtttactcgctgatcgtagagccgaaaacggtgttttataatttaatgcaaaaaggccgcctgcatctcccggcgcaagaacaagaggccgagatgtatgaaacggtcatgaggcagatgagtgaagcgggcatccgtcaatatgaaatcagcaactttgcaaagcccggatacgagtcgcagcataatctgacgtattggagcaatgaagcgtatttcggttttggcgcaggcgctcacgggtatatcagcggcacgcgcaccgtcaacgccgggcctgtgaaacattacattcagctcatcgaagaaaagggactgccttaccgtgacacgcacgaggtgacacgggaggagcagattgaagaagaaatgttcctcggtctcagaaaaatgtccggcgtacaaaagcaagcttttctcgataaattcggacgctcggtcgacgaactgtttcccgatgttctcaaagatttaaccgaaaaaggcctgatctgtgacacggaagaatcggttgcattaacgcatgagggcaaattattaggaaatgaggtttttggcgcttttttgggtgagttataattgacatttttcttttggtttgttacttttgatatagaattagcactcgctgaccttgagtgctaacaggggtgatgatgatgttaacaaatcgtcagctgttgatcctgcaagtgattattaatgattttatacaatcagcgcagcctgtaggatcaagaactctttcaaaaaaagacgagattacattcagctctgcaacgatcagaaacgagatggctgacttggaggaattgggctttattgaaaaaacccattcatcctcaggacggattccgtcggaaaaagggtacaggtattatgtcgatcatttgctgtcacccgtcaagctgacaaaaaccgatctggatttaattcactcgatatttaaagaaaaaatcttcgagctggaaaaaacagtccaaaaatcagcgcaaatcctgtccgacctgacaaactacacatcgattgtcctcgggccgacgctgagcgagaactatcttaaacagattcaaatcgttccgatccagccggataaggcggtcgccatcctcgtcacgaacacggggcatgtcgaaaaccgcaccatcaatttcccggctaaagtggatttggccgatattgaaaaactggtcaatatattaaacgatcgattagcgggcgtgccgatggacgaactgaatgagcgcatttttaaagaggttgtcacatatttaaggcagcatatcgccaactatgacagcatacttgaatcgctccgctccacattccatccggcggcccacgttgagaaattgtttttcggcggaaagatcaacatgctgaatcagccggagttccacgatattgaaagggtccgctcgctcttatctttaattgaaaaagagcaggatgttctgaagctgtttcagtcatcaaaagccgggatttcaatcaaaatcgggaaagaaaacgactacgaagaaatggaaaactgcagcttaatcacggccacctatacagttgatacgaagcagatcggatcaatcgcgattatcgggccgacgcgcatgaattattcaagagtcgtcagcctgctgcagcacgtgacttcggacttgtcaaaagcattcacaagtttgtatgatgaataagggaattttggcaatcattttcagtcatctttttacagcatttgagggaggtgaacacaatgtcagaagaaaaacaaaccgcagaacaggttgaagcagcagaacaagaagaagtgacagaacaggcagaacaagcggcttcacaagagcagcatgaagaaacggcaggtcaggaagaagcccttcagcaccaaattgatgaattgcagggtttgcttgatgaaaaagaaaacaagcttttgcgtgttcaagcagactttgaaaactataaacgacgcagccgccttgaaatggaagctgctcagaaataccgttctcaaaacgtcgtaacggaaatccttccggctctcgacaactttgaacgggcgttacaggtagaagctgaaagcgagcagacaaaaagcttgctgcaaggtatggaaatggtccgccgccagctgatggacgcacttgaaaaagaaggtgttgaagccatcgaagctgtcggtcaggaatttgatccgaaccttcaccaagccgtcatgcaggtggaggatgaaaacttcggcagcaatattgttatcgaagaactgcaaaaaggctacaaactgaaggatcgcgtcatccgtccttcaatggtaaaagtgaatcaataactacatagcaggaggtaattcaaagtgagtaaagtaatcggaattgacttgggtacgacaaactcatgtgtggcagtgcttgaaggcggagagcctacagttatcgccaacgctgaaggaaaccgtacgactccgtcagtcgttgcatttaaaaacggcgagcgccaagtaggggaagtggcgaaacgccaatcaatcacaaatcctaacacaatcatgtctgtcaaacgccatatgggtactgactataaagtggaaatcgaaggaaaagactacacgcctcaagaagtgtcagctattatccttcagcatctgaaagcatacgctgaaagctacctcggcgaaacagtttcaaaagccgttatcacggttcctgcatacttcaacgatgcagagcgccaagcgacaaaagatgccggtaaaatcgccggtcttgaagtagagcgtattatcaacgaaccgactgcagcagcgcttgcatacggacttgataaaacggacgaagaccaaacgattcttgtttacgaccttggcggcggtacgtttgacgtatctgttcttgaacttggcgacggcgtgtttgaagtccgttcaactgccggtgacaaccgtcttggcggggacgactttgaccaagtcatcatcgatcatctcgtagcagaattcaaaaaagaaaacggcattgatctttcaaaagacaaaatggcgcttcagcgtttgaaagatgcggctgagaaagcgaaaaaagatctttccggcgtatcatctacacaaatttctttaccgtttatcacagcgggagaagcaggtcctcttcaccttgagctgacactgacccgcgctaaattcgaagagctttccgctcaccttgttgagcgcacaatggctcctgtccgtcaggctcttcaagatgcggatctttctgcgagcgaaatcgacaaagttatccttgtcggcggatcaacacgtattcctgccgtacaggaagcaatcaaaaaagaaacgggtaaagaagcgcataaaggcgtaaaccctgatgaagttgtagcgctgggtgcagcgattcaaggcggcgtcatcacgggagacgtaaaagacgttgttcttcttgacgttacaccgctttctctcggtattgaaacaatgggcggcgtgttcacgaaactgatcgaccgcaacacgacaattccgacgagcaagtctcaagtattctcaactgcagctgacaaccaaacggctgttgacattcacgtgcttcaaggtgagcgcccgatgtctgcggacaacaaaacgctcggccgcttccagcttactgatatcccgcctgcaccgcgcggcgtaccgcaaatcgaagtttctttcgatattgacaaaaacggtatcgtaaacgtaagagcgaaagacttaggcacaggaaaagaacaaaacattacaatcaaatcttcttcaggtctttctgatgatgagatcgaacgcatggtaaaagaagcggaagaaaacgctgacgctgatgcgaagagaaaagaagaaatcgaagtccgcaacgaagctgaccagcttgtgttccaaacggaaaagacattaaaagatctggaaggcaaagtggacgaagagcaagtgaaaaaagcaaacgacgcgaaagacgcgctgaaagccgctatcgagaaaaacgaaattgaagacatcaaagcgaaaaaagatgagcttcaaacaatcgttcaagagctttctatgaagctttatgaagaagcggcaaaagcgcagcaggctgaaggcgcagcaaacgctgaaggcaaaaaagcggacgacaacgttgtcgatgcggaatacgaagaagtaaaagacgacgaaacgaaaaaataagttctttcccgcatggctttaggcggaagaacacacagcatattctgattcaacagacagaaagtcaaagtcaggcatctcttggctttgactttttttcttgcccgggataaaaggaattgaaaaaacataattcaaaatgatacaatctaatttatgtgagaaattcgggagagtgaagcgagatgagtaagcgtgattactatgaagtgcttggggtaagtaagagcgcttcaaaggatgaaatcaaaaaagcctatcggaagctttcaaaaaaatatcatcctgatatcaataaagaatccggagcagatgaaaaattcaaagaggtaaaagaagcgtacgaagcgctctcagacgaccaaaaacgcgctcaatatgaccaattcggccatacagaccctaaccagggattcggcggcggtttcggaggcggcggagacttcggcggcttcggtttcgatgacatattctcaagcatcttcggaggcggcacgagacgccgtgacccgaatgcgccgcggcaaggcgcggatctgcagtatacaatgaccctgtcatttgaagacgcggctttcggaaaagaaacgatcattgaaattccgcgcgaagagaattgcgaaacatgtaaaggatcgggcgcaaagccgggaacaaagccggatacgtgctcgcactgcggaggttcaggccagctgaacgtcgaacagaacacgccgtttggcaaagtggttaaccgaagagtctgccaccactgtgaaggaacaggaaaaatcatcaaaaacaagtgttctgactgcggcggcacgggcaaagtgaaaaaacggaaaaaaatcaatgtcacgattcctgccggtgtggatgacggacagcagctgcgcgttccgggtcaaggtgaacctggcgtaaacggagggcctgcgggagatctgtttgtcgtattccatgtgcgcgcccacgagttctttgaacgcgacggagacgatatttattgcgaaatgccgttaacgtttgcccaagcggcactcggagacgaagtggaagtgccgacgcttcacggaaaagtgaaattgaaaatacctgccggcacacaaaccggcacgaaattcagattaagaggcaaaggcgttcagaacgtccggggctacggacaaggcgaccagcacattgtcgtccgcgtcgtcacaccgacgaatctgacagacaaacaaaaagacatcatccgcgagttcgctgaagtcagcggaaacctgccggatgaacaagaaatgagtttctttgacaaagtaaaacgcgcatttaaaggcgagtaatgattggataggagttggtagttttgaaatggtccgaaatcagcattcacacaacacatgaagcggtcgaacccatctcaaatattttgcatgaagctggtgcgagcggggttgtcatcgaagatccgcttgatttaatgaaagagcgtgagaatgtttacggggaaatctaccagctcgaccccaatgattaccccgatgagggtgtcattgtcaaagcgtatctgccgattaacagtttcctcggcgaaacggtggacggcattaaagagacgataaataatctgcttttgtacgacattgatttaggcagaaacacaatcaccatttctgaagttaatgaagaagaatgggcgacagcttggaaaaagtattatcatccggtgaaaatttctgaaaaattcacgatcgtacccacatgggaaacgtacacacccgtgaataccgatgaactgattatcgaaatggatccgggcatggcattcggaacgggaacgcatccgacaaccgttctgtgcattcaggcgcttgagcgtatcgttcaaaaaggcgaccgtgtcattgatgtcggcaccggttcaggaattttaagcatcgcggccgccatgcttgaggccgaatcggttcatgcgtatgaccttgatccggtcgctgttgaaagcgcgcgtctgaatctaaaattgaacaaagtgagtgatacggccgaagtgaagcagaacaatttgttagacggcatcacgggcgaacatgatgtcattgtcgcaaatattctggcggaagtgattctccgctttacatcacaggcgtatgacctgctcaaagacggaggccattttattacttcaggcattatcggccagaaaaaacaggaagtaaaagaagcgttggaaaaagccggctttaccatcacagaaattctgtctatggaagattgggtcagcatcatcgcgaaaaaataacagttagtaggtgtcacagcgtatgcaacgatattttatcgagctcacgaagcaggagatggacgaaactcccgattttcaaattacgggggaagacgtccaccatatagcgaacgtcatgagaatgagtgcgggagaccggataatctgctgttcgaaagacggccatgaagcgttatgcctgctcaaagcggtttctaaagatcatatatcatgcagcattgctgaatggacgggtgaaaaccgtgaactgccgttaaaaatcaggattgccagcggccttccgaaaggcgataagcttgaatggattatccaaaaagggaccgagctgggggctagtatgttcatcccctttcagggcgccagatccgtcgttaagctagacgacaaaaaggcaaagaaaaagcgggagagatgggcgaaaatcgcgaaggaagcggcggagcaatcgtaccgcaatgaaattcccgaagtgaaaaccgttcatacgttccggcagctgcttgaaatggcggagaatgtcgataaatgtgtcgttgcatacgaggagtcatcaaagcagggagaaacgggcgctttcgccgcggagcttaaaagccttccgcaaggttcgtctcttttaatcgtattcggccctgaaggcggtctgactgagtctgaagttcatcagctttcagaaaaaggcgccgtcttatgcggcctcggaccgagaattttacggactgaaactgcgcctctttacgcgttaagcgcagtttcctatcatacagagttattaagaggtgatcagtaatggcaactgttgcttttcatacccttggctgcaaggtcaatcattatgaaacagaagcaatctggcagctgtttaaagatgcgggttatgaacgaaaagaattcgaacagacagcagatgtatatgtcattaatacatgtacggtaacaaacacgggagataaaaaaagccgtcaagtcatcagacgggcgatccgccaaaatcctgacggcgtcatctgcgtaacagggtgctatgcgcaaacctctccggcagaaattatggccatcccgggtgttgacatcgtcgtcggcacgcaggatcgtgaaaaaatgctcggttacattgagcagtacagggaagagcgtcagccgatcaacggcgtcggcaatattatgaaagcacgcgtgtttgaagagctggatgttcccgcttttactgaccgcacaagagcgtcgttaaaaatccaagagggctgcaacaacttctgtacgttctgcattatcccttgggcgcgcggcctgcttcgttcccgcgatccggaagaagtcattaaacaggcgcagcagctggtggatgccggctataaagaaatcgtcctgacggggattcatacgggcggctacggcgaagatatgaaagattataatttcgccaagcttctccgcgagcttgatacacgtgtagaaggactgaagcggatcagaatttcatctattgaagcaagtcaaatcactgatgaagtgattgaagtgctggatgcgtctgataaaatcgtccgccaccttcatatcccgattcagtcaggatcaaacaccgttctgaaacggatgagacgcaaatatacgatggaatttttcgcggaccgtttaaataagctgaaagaagcgctgccgggtcttgccgtcacatctgatgtcatcgtcggtttcccgggtgaaacggaagaagaatttatggaaacataccggttcattaaagaacataagttttcagagcttcacgtattcccttacagcaaacgcaccggaacacctgcggccagaatggaagaccaggttgacgaaaacgtgaaaaacgaacgggtgcataagctgattgcgctgtctgaccagcttgccaaagaatacgcctccgattatgaaggagaggttctggaaatcattccggaagaggcgtttaaagagtctgatgaggacggcatgttcgtcggctatacggacaattacatgaaagtcgtcttcaaaggcacggaagatgtaatcggcaaacttgtcaaagtcaaaattcaaaaagcgggctatccgtataacgaaggacaattcgtccgcgtcgttgaggatgaaatgacccgaaacatgcgcatgtcttcataacagataaaaaaaccggtgccttcccgcatcggtttttttacggtttcggaggaatcagcctgtcaatcagccggtaaaacaaatgtgtgaacggcagaaacaataaggcggtgactacgttaaataacaggctgaaatgcgcaatcatctgcgcgggatcatcagacaggcgctccgtaatacctgctgatgcagacaggaagggaaagacgagcagcacgccgagaatattaaacactacgtgagcaccggcggtctgtctggcggcataaccgcctgaaacagcagccatgacggccgtgacgcatgtcccgatattagatcccagaacgacgctgaccgcttgttcaatgccgatcaccccttcgttcataaaactcatcaaaatgccgatgcagacggagcttgaatgaatgattgccgtcaatatcatgccgataaaaagagcggaccagctcgaatcattcacatggcgcaaaacctccgccccgccttcatttctgtcagcggaacggcaagccggctgaagcatgtgatgcaaaaaaagatgatgccgagaccgaggaagcttataccgatctgcctgaacggatatttacggatgaggataaacacaaggcctccgataaaaagcacccaaatgagcacatccatctttatggctaaaaactccgtcgtaaacgtggagccgacattcgtgccgagaatcatcggaatggtccgtttaaaagataaagcgcctgcgctgacaaagccgatgacaatgaccatgaaggctgagctgctctgaagaaaaccggtgaatacgatgcttatgagaaaagctttcaaagggtggtcggtaaataagagcaggcttttctcaatttttgaatacgttaatgcgatcaggccctgcctgagcaggctcattccgagtaaaaaaaccaggataagtgcggtaaagagaatcagtattatcaaacgaaacacccctttccatcattatatagacaagcagccttattcatgacggaaaagtgagctcgcttagttgacctgactgatggcttatattataatgtcaaagtacatgtttatatatgtatctttttaaaggtagtcgattggtgtattcggagggagggaaagagaatgtcaaaaacggtcgttagaaaaaacgaatcgcttgaagatgctcttcgtcgcttcaaacgcagtgtatcaaagacaggtactttgcaagaagcaagaaagcgcgaattttatgaaaaacctagcgtaaagcgcaagaaaaagtcagaagctgctagaaaacgcaaattctaaaagagggtggatttatgagtcttcttgagcgacttaaccaagatatgaagctgtatatgaaaagccgtgagaaagacaaactgactgtcgttcgaatggtgaaagcttcacttcaaaacgaagcaattaagcttaagaaagacagtttgaccgaggatgaggaacttactgtcctatctcgtgaacttaagcaacgtaaagactccctccatgaattttcaaacgctgatcgtttagatttagtagataaagttcaaaaagagctggacattttagaaatttatttaccgaagcagctttctgaagaagagctgcagacaattgtaaatgaaaccatcgctgaagtcggtgcgagctccaaagcggacatgggcaaagtgatgagtgctattatgcctaaagtaaaaggtaaagctgacggcagtgtaattaacagacttgtcagcagtcaattatcttaattgacaagaaaaaagacatctttcctagagagatgtctttttttatacataaaaaaatgaaactaaagtacatttgttacgtatataaagaagaacgaaacgggaaggagggtatatttgccttgttccgaaaaaaaaacggaattgctgttgctctattgggcttatttgtattatctttattaggggttcaattgaacgcgaaagctgatcacccatcggtttatgtcatcccggttgagaaaaatgtcgaacaggggctcgcctcgtttttatcgcgttctttcaaagaagcgaaggagtccggcgcgtcacacattattcttgacatcaatacaccgggaggcgccgttcaatcagccttggatattgcggatatcatcggccgcgcggatgtgcctgttaccgcttacgttaataaacgggcgctttctgccggagcgtatatagcgcttcaggcagatgaaatctatatggcgccgggcggaaaaatgggtgccgcagccatcatcgacggaaaaggaaacgcggcggacaaaaaggctcaatcactgtggcatgcagaaatggaggacgcagcggttaaaaacaaccgaaatccgaaatacgccctggccatggcagatcccgccatcaatgcaaaggaagcgggcgccccaaagggaaaactgctgacactgacagctgaaaaagccaaggaagtcggatattcggagggcacggtttcagaccttgatgctttatatacaaagctcggttttgacaaagcggatgttcaccatgcaaaagaaggttttgtcggcaaattgggcagatggctgacaaatccgtttgttgtccccgtcttattaacgcttgctttgcttggtttgaccattgaattgttctcgccgggcctcggaataccgggtgccgtcggactgacggccatgctgctgtttttcaccgggcatatcgctgccggattcgccggctatgacagcgtattcttattttgcgcgggcttggtttttatccttttagagatatttctgcccggaggcataatcggtcttatcggtattgcaggcgtcatcgcgagcctctttctcgctgcgggcagctttaccgtaatggcggtttctctcttgatcgccattgctgtgtctattacagcctttatcatattaacaagggtgttggggaaacgaatgaaattctttaaaaaattaatattaactgattcaacaagcacggagagcggttatgtttcaaatcagaaccggacggagctgttggggaaagtcggcattaccgctacagccctcagaccgtcaggcaccgtcattattgatgatgaacgtctggatgtcgtctcggaaggatcattcactgaaaaagacagacaggtgaaagtagtgaaagcggaaggctcacgcattgtcgtgagagaaatatagatgataaccttgaggaggaattagatggaactgtcaagtttggcgattttagcaatagttgcagctgccataatcgtgttagccatattcttcacctttgtaccggtgatgctatggatttcggcgcttgcggcaggagtcagaatcagcattttcactttggtcggaatgaggctgcggcgcgtcataccaagccgcgttgtcaatccgttaattaaagcgcacaaagccggcctatccgcaacaacaaatcagctcgaaagccattatctggccggtggtaatgttgacagggtggtcaatgccctgattgcggcacagcgcgccaatattgagctgacatttgaacgctgcgcagccattgacctggccgggcgtgacgtattggaagccgtgcagatgagcgtcaatccgaaggtcattgaaacaccgtttatcgcgggtgtcgccatggacggaattgaagtaaaagcaaaagccagaatcaccgtaagagccaatatcgagcgccttgtcggaggagcgggagaagagacggttgtcgcccgtgtcggagaagggattgtctcgacaatcggttcctcgggtaatcataaaaaagtgcttgaaaaccctgatatgatttcgcagaccgtacttggcaaagggctggattcaggcaccgcctttgaaattctttcgattgacatcgccgacgttgatatcggcaaaaacatcggagcgattcttcaaacggatcaagcagaagcagacaaaaacattgcgcaggccaaagccgaagagcgccgcgccatggcggtcgcccaagagcaggaaatgcgcgctcgcgtagaagaaatgcgtgcaaaagtcgtggaagcagaagccgaagtgccgcttgcgatggcagaagcgctgcgtgaaggaaacatcggcgtcatggactatatgaacataaaaaatatcgacgcggatacggacatgagggattctatcggcaagctgacgaatgaccagcaagatgaagaccaacaataacctctctattaaggagggagccgctatatgcacgagattctgacaaatccgctcgtcattgccgccgtcatcggcattatatcggcaatattcggcaagaaaaacaaagatgaaaaacggccgccgggtacacgccccgaaaatcagacaaaaaagcaggatcaaaaacagccgcagaaagagcataagccggaagcggaagaattgcctgccgtttcagaagagaacccttttgagcaaaaaagaagggaagctgaaaagcgcctagcggagacggagcagatgtttaacgggcttgaacataagctgacatctcaacgcgcacgaaacgcgtctctgaagaaatcagccctcaaaataaataaagaaactgcggttcaaggcattatattcagtgaggttttgggtccgccccgtgcaaaaaaaccgcaccggaccatgcggagcatcggtaaaaaataaagtgttagaaccccttttcaaatcatacatatgagatgaaagggggttctttttttatggggcaaagaaagaatcgtgtaaaggcatggctgacaagagcattggaaattcccccggacgttatgatggatctgcctcggattacgatggtcggcagacttcatatctacatagagaatcacagaggcctcctgctgttcagcgaagaagaagtcaggctgatgctcaagcaggggcaatgtatcatatcaggaaaaaacttggtcattaaggcaatccttcctgaagaaattcttttggaaggcacgatagatcacgtacgatatgtcgattcataaagccggggggaaataatgtgaaaaacaaatggctgtcatttttttcgggtaaagtccaaatggaagtcaaaggaaaagggattgaacggttgctgaatgaatgcacgagaaacggaatcgccatctttgcggtgaaaaaaaagcaagactgtgttctgctgatgattcagcttcaagatgtacatgctttcagaagagtcatcagaaaacatgaatgcaaagcaagctttacaaaaagaaagggtcttccctttctgcttctcaaatcaaaattaaacctgggcttcactgcgggatttgtgatgtttttcgttatattgtttcttttgtccaacatgatttgggacattgatattaaaggggccaagcccgaaaccgagcatcagatggtaaagcaccttgaagaaatcggtgtgaaaaaaggacgtttgcaatttttaatgatgacgccggagaaaattcaaaaatcattaacaaacggcattgataatattacgtgggtcggtgtggaattgaacgggacagcccttcatatgaaagtggtcgaaaaaaacgaaccgacaaaagaaaagtacgtgagcccccgccatatcgttgccaaaaagaaggcggtcatcaaaaggatgttcgtgcaaaaggggcagccgatggcttttgtgaacgatcatgttgacaaaggacagcttctcgtctcaggactgatcggaaatgaagatcggaaagtcgcctcaaaagcggaaatttacggagaaacatggtacaagtcagaagtaaccgtgcctcttgaaacatcatttacgctatatacgggtaaagtaaggacgaagcacaagctgtctttcggatcatggggcgtgcctttttggggctttgaatttaatgaggagccgctgaaacatccgaaaacagaggaagaaaagcacccgtttcaatttctggggatgaagcttccgatttcttacgttcaagaacagacaagagaaagtgaaacaaccgtgcggacttatacgaaaggcgaagcggttcaggccggtatcaaaatgggaagacaagatgtagaaaagcgattaaacggcagcggagaggtggaaagtgaaaaagttttgcaccaatccgttgagaatggtaaagtaaagttgattattctctaccaagttatagaagatatcgttcaaaccacacctattgttcagggagactaaagaatggcagaacatttacttgcgattaatcacaaactgaaaagcccggacgaagcactttctttgttcggcagccaagatgcctttttacatttaatggagaaggatctgggcattagcctcatcacgcgcggtgaaaccatttacgtttccgggaatgatgaaacatttgagatcgctgacagattattgggctcgctccttactttaattcgcaaggggatcgagatttcggaacgtgatgtgctgtatgccgtgaaaatggcaaaaaaagatgaactggactattttgaaagcatgtatgaagaggaaataacgaaaacggcaaaaggcaaaccgatccgtgtcaaaaccctcggccaaagagaatatgtggcggcgatgaagaaaaacgacatggtgttcggcatcgggccggcgggaaccggcaaaacttatttggcggtcgtaaaagcggtgcatgctttaaaaaacggccacattaaaaaaatcattttaacaagacccgctgtggaagccggcgagagcctcggctttctgcccggagatttaaaggaaaaagtagatccttatctgcgcccgctgtatgacgcgctccatgatgtgctcggaagcgaccatacggagcgtcttatggaaagaggggttattgaaatcgccccgcttgcctatatgagagggcggacgcttgacgacgcgtatgtgattcttgatgaagcccagaataccactcccgctcaaatgaaaatgtttttgacgagattgggttttggctctaaaatgatcattacgggcgacgtaagccaaattgacctgccgaaaggcgtcacatcgggacttgcagtagcgaaggatatgctgaaggacataaacggcatctccgtgattgaacttgaccagacagatgtggtcaggcatccgcttgttgcaaaaattattgaagcttatgataagcaaaagtaatgcaaaaatgacccgatctcccgttatcgggtcatttttatatgatgtgttcctgatgtttcagggaggaggttcttgttttgaaaaagaaggaaaagggcaaaagcgcccgggaacggttccgcagtttcagacatgcccgctcagcccatgtgctgctgtacctgctgctttcagcgatcatgtttggtttgctctttattcatgtaaaacctgaatcacttaatttggatttgttttcagtcagtgataagacgatttacgcgcccgccacagtggaagatcagcaggcgacggaatcgaaaaaacaggcggccgaagatgcggtggaagatcaatacaccctgaaaaaaggctataccgacaaccggcttgacctgatcacttccatttttgacagcatcggcgaagtgaaaaaagatgcggaaaaagacaaaaagtcaccttcggaaaaatcattggtcaaatcggtgaaaaacaagctgacacaggatgtcaatgaatccgtctcggaagatgccattaaatcgcttctccatgcaaacaatgaagatttctcatttgtgagggattccgtcattaccgcggtgaatacggtgatgagcagtgaaattccttctgaaaagcttgccgaagcgaaggataaggtcgcaaaagagctgaaaagcgcttctgtgccgtcaaaatatttagcggctgcgactgaaatcggaaaatacgcggtcattccgaattacgtatttgatccgaaagcgacggatgaaaaacgccaggaagcgtcagacagcgtccagccggtacagatcaaacagggacaggttctcgtggaagagaatgacctgatcgaccgggaagtatacaggaagcttgaactgacggggcttttgaataattccaacctgttaaagccgatcagcggtctgcttctgatgatcgggctgtttatcgccacgcttgtctactattttgagaaacagcagcaggagcttaagctgaaaaataaatctcttttgctgttttctatcattacaacgcttattctcgtcattatggaagtcgtcagtctctttcagaagattgaatacaccaatatcggctatcttgtgccgatcgccgccggcgcgattttaatcaggctgctgctcaatgaaaggctcgccattttgggaagcatcattctggcgatctgcggcagtatgatgtttaatcagggtgtgacgggaacatttaattacgtcatcggcatttactatttaatcagcagcatttcaggcattctgtttttggggaaacacaatgcgagatcaaaaatattgcaggcgggactgttcgtctcatttattaatatgattatcgtgctgtcgcttttattaatacaaaatacggcgctgtcacctgttgaaatcggaacgctgatgctgatgggggtcgtctcgggacttgcttcatccgttttgattatcggtctgatgccgttttttgagacgggattcggcattctttcaacgatgaggctgattgaactgtctaatccgaatcatcccctgcttcgaaagattttaacggaaacacccggtacatatcatcacagcgtcatggtggcaaatctgtcggaagcggcttgtgaagccgtaggggcaaacggtcttttagcacgggtcggagcatattatcacgatctcggcaaaacgaaacgtccgcaatattttattgaaaatcagatgaatatggataatccgcatgacaagctgtctcctcagctcagtaaaaatatcattatcgcacatacgacagacggtgcgaatatgctcagaagctataagtttccgaaagagcttgtggatatcgcggagcagcatcacggaacgtcccttttaaaattcttttattataaagcgaaagaaaagggcgaccagattacagagaaagagttccgctacccggggccgaagccgcaatcgaaagaagcggctattatctcagtggccgacagcgttgaagccgccgtccgttccatgcataatcccaatcccgagcggatcgaaaaactggtgcggggaattatatccgataagcttcaggacggacaattctcagaatgtgatctcacgttccgagaactggatacgatcgccaaaacactatgtgcgactttaaaaggaattttccactcccggattgaatatccggaggctacgaagaaggtgaaataaatgggtttactcatagatattgttgatgaaacgaacagcgtctcagctgatgcgctccaagaagtggagaagctgctccaattcgcggcggaaaaagaaggcgttcaggatcaggctgaagtatcggtcacgattgtgacaaatgaagaaatcagagaaatcaacagagactaccggggaaaagacactccgactgacgtcatttcgtttgcgcttgaagaagaaggcgaagacgaggtggaaatcgtaggcgccgacatgccgcctgttttaggagatattatcatcagcgcagacagaacgaaagagcaggcggaagagtacggccattcgtttatgagagagctcggttttctggccgtgcacggctttttgcatttgcttggctatgatcacatgacaaaagaagaagaggaagaaatgttttcaaagcaaaaggatttgctggatgagtatggactcacgagatcataaaaacgagtggagcaggttcctgaagagctttgtccatgcatggaggggaatctggaaaacggcgcggtcagagcggaattttcaatttcatattaccgcggcctgcgccgttatcgtttgcggttttctcaccgggctgagcacagccgaatgggccgttgttttggtgctgatcggagggatgcttgctttggagcttttaaatacggcgatagagcatgttgtggatttagttactgatcagtatcacccgctcgcaaaagcggcaaaggacgcggccgccggagccgtttgcgtctttgccgtgatatcgtgtatcattggtttactcatcttcctgccgaagatatgttagcagaagattcttacaattattttacattgccaaaaatgggcgtgaaaaaccgatcataattatgtaaaataaaagtgacagcggtatcatacaggataaaggtaagagaggaattaagtacacatgaacagacaagaattgattgcagaagcattaaaagcacgggacacagcgtatgtgccgtattcaaatttcagagtgggagccgctcttcttaccaaagacggaaaagtgtacagaggctgcaacattgaaaatgcggcatacagcatgtgcaactgtgctgaacgcacggcgatattcaaagctgtttccgaggggatacggaatttgcgatgctcgccgtggctgcggatactccgggaccggtttcgccgtgcggagcctgcagacaagtaatttccgagctgtgctcaaaggatatgcttgttattctgaccaacttacaaggacaaataaaagaaatgactgcggaagaattattgccgggcgcattttcatcggaggatttacatgacgaacgaaagctttaaatcaggatttgtatctatcatcggaagaccgaacgtaggaaagtctacctttttaaacagggtcatcggtcaaaagatcgccatcatgagcgacaaaccccagacgacaagaaataaagtccaaggggtgctgacaaccggcacgtcgcagactatttttattgatacaccgggcattcacaaaccgaagcacaagcttggcgactttatgatgaaagtggcgcagaatacgctgaaagaagttgacttggtgttatttatgatcaacgccgaagaagggtacggaaagggcgacgagtttatcattgaaaagctcggacagacgtccacgccggtctttctgatcgtaaacaaaattgataagatccaccctgaccagctgcttcttttaattgatgagtaccgtgcgcgctatccgtttaaagaaatcgtgccgatctcagctttggaagggaacaacgtcgaaacccttctcgcgcaggttgaagcgtatttaccggaagggcctcaattctatccgagcgatcaggtgactgaccatcccgagcggttcattatttctgaactgatcagggaaaaggtgctccatctgacaagggaagaagtgccgcacagcatcgctgtcgctatcgagtccattaaagggcaggaaaacggctccgtccatgtcgccgccaccattgtagttgagcgggattctcaaaaaggcatcgtcatcgggaaaaaaggagcgcttctgaaagaagtcggcaaaagagcgcgggctgatattgaagcgctgctgggttcacgcgtttacctcgaattatgggtgaaagtgcagaaggactggcggaataaaatgtctcagctgcgtgatttcggcttcaaagaggatgaatattaattcatctaaagcgcatgcctgatgtgtgggattacctcacagaaacagggcttcgttagcaaaatttgtttaacatgaaaaggaggacatcaggtcaagataagggtaagaatttggattggcaagctagtttaatgatgaaaggtgggttttttgtgttgaattttacctggaacgtattttctcaaacaggaagtgttgatacgtaccttctttttaaagaactggaaaaagagaacctggaaagacccgaagaaccggaagatgagctagcccgaattgattttccaattttgtaaacctcttggcccctcccgttgttggaaggtgcggaaatgctgactaaatgtgaaggaatcgtgctccgtacgaatgactacggggagacgaataaaatcgtgacattgctgacgagggaacacggcaaaatcggcgtcatggcaaggggcgccaggaagtcagccagccggctgtcagcagtcagccagccgtttttgtacgggtcatttttaatgcaaagaacatccggactcggcacgctccagcagggtgaaatgattctcagcatgagaacgatcagagaagatttatttttgacggcgtatgccgcttttatcgctgaactcactgacaaaggaacggaagagaagaaaccgaacccctatttattcgaattgattctcgaatcctttaagaggctgaatgacgggactgacccggacgtgatcacattcatcgtgcagatgaaaatgctcggcgtcatggggctgtatccggagctgaatcattgtgtccactgcaaaagcggggaagggacgtttcatttttcgataagagataacggttttatctgccaccgctgctttgaaaaggatccgtacagagttccgatttcgccgcaaacggcaaggctgctaaggcttttttattactttgatatcggaaggctcggcagcgtctcgttaaaacaggaaaccaaaaacgaaattaaacaggtcattgatctgtattacgaggaatattcaggactttatttaaagtcaaaacggtttttagaccagatggaaagcatgaagaaccttttggatgaaaacaaaagttgacattctgcccatctttttatatgatcatttattataaaatatgttgcagtgacagaaagaagtacttgcgtccaactcatacaagcgaccttaggacagtgtaagctaaggatgagcgcgcaacgaaaggcattctcgagcaaccctttaaaaagaggctgagtgattcacatcctcagcaactagggtggaaccgcgggagaactctcgtccctatgtttgcggccggcaagcatagagacgggagttttttggttgccgccgcacttgtaaaagaatggagaaagtggaggtgcttgaaatgaacattcaagatatgattttaaccttgcagaagcactggtcgaatgaaggctgtgtgctcatgcagtcgtatgatgtggagaaaggcgcaggcacaatgagcccgtatacatttttacgaagcatcgggccggagccgtggagagtggcttacgttgagccgtccagacggcctgcggacggacggtacggtgaaaacccgaacaggctctatcagcatcaccaattccaagtcattattaagccgtcgcctgataacattcaagagctttaccttgattcattgcgtgcgctcggcattgacccgcttgaacatgatatccgtttcgtagaagacaactgggaaaacccgtctttaggctgtgcaggtctcggctgggaagtatggcttgacgggatggaaattactcagtttacatatttccagcaggtgggcggaattgaatgtaagccggtgtccgttgagatcacatatggtattgaacgtctcgcgtcatatattcaggataaagaaaacgtctttgatcttgaatggacgtcaggatttactgtgaaagatttatttatgatggctgaatatgagcattccgtttatacttttgaaacatctgacgtggatatgcttttccatttgttcagcacctatgaaaaagaagcgatcagacaaatggataacgggcttgtgcatccggcctatgattatgtgctgaaatgctctcacacatttaatctgcttgatgcaaaaggcgcgatctcggtgacagagcggacgggttatatcggccgtgtccgcaacttagcgagaaaagtggcaaaaacgtattatgaagaacgggaaaaattagggttcccaatgcttaaagaggagggctcttcccatgagtaaacaagacttgcttttagagatcggactcgaggaaatgccggcgcggtttttacatgacagcatggtgcagctcggtgaaaagctgaccggctggcttgctgaaaaaaatatcgcccacggcgaagtgaaactttttaatacgccgagacgtctggcagtatatataaaagacgtagcagaaaaacaggctgatattcaggaagaagcaaaaggccctgcgaaaaaaatcgctctggatgctgacggaaactggacaaaagccgctatcggattttcaaaaggccaaggcgccggagtggatgacctgtatataaaagatgtaaacggcacggaatatgtcttcgttcaaaaattccaggcgggacaagagacgaagacacttttaccgcaactggaaaatttgattgccggaatgcattttccgaaaaacatgcgctggggcacgcaggatctgcgctatatccgtccgatcaaatggattgccgccctctttggaaaagacgtcattccgtttgaaatcacaaatgtcaagacgggccggaacacgcagggacaccgctttctcggccaagaagtatctgttgatgcgccgtcatcatacgaaaagctgctgaaagaacaaagcgtcattgctgacccgaaagaacgcaaacaaatgatccaaagccagctggatgcgcttgcggccaagaagaaatggaacattccggtcgatgaggatctgctgaacgaagtcaaccatctggtggaatatccgacggcgctttacggatcttttgaatccgagtttctttctatccctgaagaagtgcttgtgacaacaatgaaagagcatcagcgctacttcccggtaaaagatgaaaacgggaatttgcttcctcattttattacggtgcgaaacgggaacagccatgcaattgaaaatgttgcccgcggaaacgagaaagtgctgagagcaaggctttcagatgctgcgttcttctacaaagaagaccaaaagctgaacattgatgaaaacgtgaagaaattggaaaatatcgttttccatgaagagctcggctcccttggagataaagtaagaagagcggtcaccattgcgggcaaacttgccgtccgcctgaaagcggatgaacagacgcaaaaacttgtgaagcgcgccgcagagatttctaaatttgacctggttacacatatgatctatgagttccctgagcttcaaggcgtgatgggagaaaaatatgcgcgcatgctcggtgaagatgatgccgtcgctgccgctgtcaatgagcactatatgccgagagcggccgggggagaagtgccttcaacctttatcggcgcggtcgtggcgttagctgataaactggacacgattgcttccttcttcagcattgacgtaattccgacaggttctcaggatccgtacggattgcgccgtcaggcaagcggcattgtttccattctgatcgaccgcaactggggcatttcttttaaagaactgctgtcgttgacagaaacggaaaaagagaatgagctccttgatttctttacacagcgtctgaaatacgtattaaacgctgaagacatccgtcatgacgttattgatgccgttctggacagcacagagcttgagccgtatgcagccgttcataaggcaagagtgcttgagaagcacctcggcacacccggctttaaagaaacggctgaatcactcggccgggttatctccatcagtaaaaaaggcgagagccgcgatatcaagccggatctgtttgaaaatgaacaggagaaaaagctgtttgacgcttatgaaaaaacaaaagacagtgtcgcggaaagctttgcctccaaaaactatgaacaggcgcttgccgtgctcagcggattaaaagagccgatcgaagattactttaatcacacgatggtaaatgcggacgatgaagcattaaaaaccaaccgtttagcgcaaatgaccgctcttgcagatgtgatcaagtcttttgctaatatgaatcatcttattgtaaaataaagaaaaagacggttgctgtgtgatcggcaatcgtcttttccccttttacataaacatcacagaatgaaaacatagataaagaaacccttccataaaggtggtgagtacgatcgaattaaataaacggcaagaacaaattttacagattgtaaaggaaaacggcccgattaccggagagcatatcgcagaacagctcaatttaacgagggccacgctgcggccggacttggccatactcaccatgtcaggcttcttagaggcccgtccgcgggtcggttatttttatacggggaaaacgggaaatcagctgcttgcggataaattgaaaaagctgcaagtgaaagattttcaatcgatccctgttgtcatcaatgaaaatgtctcggtatacgatgccatctgcaccatgtttttagaagatgtcggcacgttatttgtcgtagatcgtgatgctgtcttagtcggtgtgctgtcacgcaaagatttgctgcgggcgagcatcggccagcaggaacttgcctcaataccggttcatattatcatgacaagaatgccgaatatcgccgtctgccggcgtgatgattatgtgatggacatcgccaagtatttaattgaaaaacagatcgatgccctgcccgttattaaagatacggataaaggctttgaggtcatcggccggtttaccaaaacgaatatgactaagatacttgtcagtttatcagaaaatgaaatcatataagcttgaaaactaacgggggataacatggacaatcgcatcatttatgtagtatcagactcagtcggagaaaccgccgaactcgttgtaaaagcctcgctcagccagtttaacggctcagccgatgatacgcatatcagaagaataccttatgtggaagatatcggcaccattaatgaagtcgtgtctctcgccaaagcggacggcggcattatttgttttacgctcgttgttcctgaaatgcgcaaatacctggttgaacaagcggaaaaagcgaatgtgctgtattacgatattatcggtccgctcatcgataaaatggaatcggcttacggtttgaccgccaaatatgaaccgggccgcgtccggcagcttgatgaagattatttcaaaaaggtcgaggcgatcgagtttgccgtcaaatatgacgatggcagggatccaagaggcattttaaaagccgatatcatcctgctcggagtatccagaacgtctaaaaccccattatcacaatatcttgcccataagcgtctgaaagtggccaatgtgccgatcgttcctgaggtcgacccgccggaagaactgttcagcgttgatccgaaaaaatgcatcggcttaaaaatcagccctgataaactgaaccatatacgtaaagaacggttaaaatctctcggcttaaatgacaaagccatttacgccaatatcaacagaattaaagaagagctggagtattttgagaaaatcgtggaccggatcggctgccaagtcgttgacgtttcgaataaagcagtcgaagaaacagcgaacatcattcatcatctcaaaacaaagggccgataactcaggacgctttatcctgggtttttgggtatgcaaatagggaataaacaaaaaggatggcatcttcgcgaagtttgtattataataaaaaattgtgataaaatgtttatttttaggtttaagcttcgtgtgatacgaataaactattatgggtaagatgtcaagaataactcccggaaatttttcgacaaagctcaaaatagatccgcagtcatggagcatatgcgatttcgcttgtttttatgcaggagattgatggagggatggagaattagtcttctaaatgaaaaagaaaagacgatttttgtcgatgcagacgcatgccccgtaaaagaggaaataatgctcattgcatcgcaattcagcgttcgggttattttcgtcgcatcatttgaacactaccagctttccagaagcaaagacgagaactgggtatacgttgatcctcataaagaagcggcagatttatatatcgcaaaccatgtgagatcgggagacgtcgtagtcacgcaggatatcggtttagcatctcttttgctgaacagaaatattgccgtcttatcggaaaggggccgttcttatactgaagacacgattgacttcgctctgatgagccgtcatatgtcaggcaaaatgagaagaagcggcattcattccaaaggacctaaaaaattaaataaagaagatcggaatcgatttgttaccctgcttaaaaaaatcctgtcgaatgatgaagggatttcaaatcaaaacatcgaataatgtacgacggagtgttataagatgggaaaccgcataccagatgaagtagttaatcaggtgcagcagtcagcagacattgttgaagtcataggtgattatgtccaattgaaaaagcaaggccgcaactactttgggctctgtccgtttcacggggaaaacacgccctcgttttccgtctccagcgataagcagatctttcattgcttcggatgcggagcgggcgggaacgttttctctttcttacggcagatggaaggctattcatttacggaagctgtttctcaccttgcggataaatatcagattgatttccctgatgatataacgattcactctgcatccaggcctgaatcttccggagagcagaagatggaggaagcccacgagcttctgaagaaattttaccatcatttgctaataaatacaaaggaaggccaggaagcgttagattaccttttatcaaggggttttacgaaagagctcatagatgagtttgaaatcggctacgcgctggattcctgggatttcatgacgaaattcttgaaaaagcgcggttttgaggaagaaatgatggaaaaagcgggtctgctgatcagaagagaagacggcagcgggtattttgaccgtttcagaaacagaattatgtttcccattcatgatcaccacggagccgtggcggctttttcaggaagggcgctcggaagccagcagccgaagtatatgaacagcccggaaacgccgctgtttcataaatctaagctgctgtataactttcataaggcgcgcctgccgatcaggaaagaggagagagccgttctgtttgaaggcttcgctgacgtcatatccgccgtcagctcaggcgtaaaagaaagtatcgccacaatggggacgtcgctcaccgaagagcatgtgaaaatcctcagaagaaatgttcaggaggtcattctctgctacgattcggataaagccgggtacgaagctacgctgaaagcggccggcctgctccagaaagccgattgtaaggtaagagtaagcatgctgcctgacgggcttgatcctgatgattatatcagaacccggggcggagaaaaattccggaccgatatcattgatgcaagcgttacggtcatggcttttaaaatgcaatatttccgcaaagggaaaaacttatctgacgaaggagaccggctcgcttatatgaaagaagtgctgaaagaaatcagcgctctttccgggtcgcttgagcaggaaatgtatgtgaagcagctcgcctcagaattttctctttcggtagaatctttgacggaacagctttccatctacgccagacaaaacgcccccggcgacaaaaacgccgaaccgcagacaagacgggcccgggtgacgactaaagcgaaacggcgccgtctccgtcccgcctatgagaacgcggaaagacttctgctcgctcatatgctgagagaccgaaacgtcatcaagaaagtgattgagcgtgtcggctttgaatttaacattgacggacatcgtgcgctggcagcatacctgtacgctgtttatgaagagggtgctgacatgacgccgcagcatcttatggcgagaatgcaggatgaggaaatcagccagctgctttcagatatagggatgctccaagtaaacgaggagctctcagaggccgagttatccgattacgtaaaaaaagtgttggatcaccgaaaatggtcaatgataaaggaaaaagaagcagaaagagcggatgcggagaggcagaaagacttcgtgaaagctgcgtctctggctcaagaaattgttgcattgaaccgatcattaaagtaacaacaaatagaggcttgcgttctgattggcaatgattccttgcggaggagcaaatagatcgcttaacctcatcatgaattgtcattattatccgcagccctgcatgctgaaaaagagagaaggcttccgggtcggataagaaacataccgcttttagaattcgttgcaagctttggaaggagggatccataatggctgataaacaaacccacgaaacagaaacagaacttacattagaccaggtaaaagagcagcttactgaaactggaaaaaaacgtggcgttttaacatatgaagaaattgctgaacgcatgtccagctttgaaattgaatcagaccaaatggatgagtattatgaatttttaggagaacaaggtgttgaattaattagtgaaaatgaagaaacggaagatcctaatattcaacagcttgccaaagccgaagaagaatttgaccttaatgacctcagcgtaccgcctggcgtaaagatcaatgatccagtccgcatgtaccttaaggaaatcggacgggtaaatcttctttctgctaaagaagaaatcacctacgctcaaaaaattgaagagggtgacgaggaatctaaacgcagactggctgaagcaaaccttcgtttagttgtcagcattgctaaacggtatgtcggccgcggcatgcttttcttagacttgatccaagaaggaaacatgggtctcatgaaagccgtcgagaagtttgactaccgtaaaggatataaattcagtacgtatgcgacttggtggatcagacaggcgattacacgcgccatcgctgaccaggcgagaacaatccgtatcccggttcacatggtggaaaccattaataaattaatccgggtgcagcgtcagcttcttcaggatcttggcagagagccgacaccggaagagattgctgaagacatggatcttacgcctgaaaaagtccgtgaaatattaaaaattgctcaagagccagtttctttagaaacaccgatcggtgaagaagacgactcacatctcggtgattttatcgaagaccaggaagcgacatctccgtcggatcatgcggcatatgagcttttaaaagaacagctggaagatgtgctggatacgttgacagatcgtgaagaaaacgtgctgcgtctccgtttcggtctggatgacggacgcacaagaactttggaagaagtcggcaaagtgtttggagtaacgagagagcgtattcgccaaattgaagcaaaagcgcttcgcaaattgagacatccgagcagaagcaagcgtctgaaggattttctcgaatagaatggaacgggtctttttgatccgttcttttttatgtataagatatatggataatatacctttattttactggataagcatatgttttgcaaatgagtttggaaaaaatgcggcatgtcctgaaaggggggaaatgagacaagtttatttatattctttattgtaagcgtatacaattcattatacaatagaataaagataattttgtggtaagcaaaacagttatttttgctttttgtataaattgtgaaatcattgaaattgctgagcaagaccatttactttttgtaaaaataagttagaattagaagtgtttacataggggagaatgaaaaagggggatggagatatgaagtggaatccgctgattccttttttgctcattgcagtgctgggaatagggctgactttctttttagctgtaaaaggcaatggagatgcgcatcagatcgcaagcggcggtgaaagcaaaaatgccgagaaggaaactgcaaacgcttcacctgaagagatttataaagccaactgcatcacctgtcacggagaaaactatgaaggtgtgtcagggccgaacttaaaaggcgtcggcaaaagaaaagatgtcgctgagattaaaacaaaaattgaaaaaggcggcaacgggatgcccgcgggccttgtgccggccgaaaagctggatgacatggcaaaatgggtttctgacattaaataaagctttaccggtccctatataaaagacatatgaaaaactctatccgccgcttggattccgggcggtttttttatatgatagtaaaggaaaaagaacctgagaaaagttgtgatattgtgaatgaaatgaagttatcgaaaagattgcagtctgtggcggaatatatccctccgggtgccctggttgctgatatcgggtcagaccacgcgtatcttccttgctatgccgttttgaatcatttggcaagccgggcaatcgccggtgaaattacagacggaccgtttctatccgccaaacagcaggtggaaaaactgcacttaagcactcttatctccgtaaggaaaggtgacgggctgagcgtccttgaaaaaggagaagccggcgccattacgatcgctggcatgggcggagcgctgatcgctcatattttggagtcgggaaaaacgaaattgacagggcgtgaacggctgattctgcagccgaatattcatgccgttcatataagagagtggctgtatcaggaaggctatgaactgcttgatgaagtgattctcgaagaagacggaaagtgttatgaaatcctcgttgcggaaactggcgaccgtgatgcgccttatcgggatgtgccgatggctgtcggaatgcttgcgggtccgtttttgttaaaagagaggaatgaagtgtttcttcggaaatggagccaggaacttaagcatactgaacaaatttatgaacagatcagccgcagcgcaaagcatgaaaatcatgaaaaattagctgaattgaaagagcggatttctctgctgaaggaggtaatcggacatgcctaaacatgtgaacggacaggaaatcatccagctgtttgaacaattttcaccgaaggcttatgcggtggaaggagataaaatcggactgcagatcggtacattgaataagccggtgaaaaatgtcatggtgacactggatgttttggaacaaacggtagatgaagccattgagaaaaaagttgacttaattatcgcccaccatccgccgatttttcggccgcttaaacagatcaccactgatcagccgggcggaagactgattgagaaatgtataaagcatgatattgccgtatatgcggctcatacgaatcttgatgtagcggacggcggtgttaacgatctgcttgccgaagctctcggcctgacagacactgaagtgctcgtcccgacatattcggacccgatgaaaaaacttgccgtatatgttccgaaagactatgaagaagctgtaagaaccgcactcggcaacgccggagcgggacatatcggcaattacagccattgcgcgttctcttctgagggaatcgggagctttaagccgctggacggggcagacccgtttatcggacagacgggagagctggaactcgtccatgaagtgagacttgagaccgtttttccggcaagtatggagaaaaccgtcgtaaaagcgctgaaaaaaagccatccgtatgaagaggtggcatatgatatttatccggtggagcagtctccgcttgaaaaaggcctcggccggatcggaaaacttcagcaggacatgacgcttgaagagtttgctctgtttgtgaaagaaaagtttgacgttaacggagtccggatggtcggagagcgaaacagcaaggtgaaaaaggtcgcggttcttggcggcgacggaaataaatatatttatcaggcaaagcggaaaggtgcagatgtttacgtgacgggcgacctttattttcatgtagcgcatgatgcgatgatgatgggattaaacgtcgtggacccggggcattatgctgaaaagatcatgagaaaaggcacggctgagaagcttacggcaatggccggagagaaaaactatgacgtgcgcattttcgcttccgaaacagatacaaacccatttaccttcttataaaaaaactgaggccccgggcctcagttttttatttttactttcggaagaatttttttgagcggcacactgtgttcaagctgccatgtcgattcatcgttgtggtcaaactgctctaaaaagcggatgacttcctttgtaatcggtgtcggtgttgatgcgcctgcggtaacggcgacggtattgacgtctttcagccattcgagcttcagttcactgatgtctccgattcggtaggcttttgttccggcgatttcttctgacacttgagccagcctgttggagttattgcttttcggatcgccgacaacaatggttaagtccgctttttttgcctgctctgatacagcttcttgacgaacctgtgtggccaggcagatttcctgatggtattccacgtgcgggtacttttctttgactgattccataatatcgtggacgtcccactgggacattgtcgtttggtttgtaacgattaatttctcagcctgaatatcgagatttctgacgtcttcttctgtttcaacgagatgaacgatttcaggagcgacgccgacggctccttcaggctcggggtggccttttttgccgatgtatatgacatgatagccttcagcttttacttttcggattaagtcatgtgttttcgtgacgtccgggcatgtggcatcaatcgtaacaagccctttttcctcagcggcttttcttacttccggagataccccgtgagccgtgaaaataacggttcctttttccacctgctttaaaatctccagacggtttgtgccgtcaagcgtgtaaatgccgtcttcctcaaacgcatctgtgacatgcttattatgaacaatcattccgagtatatatataggtcttggcagtgttttatcgagtgacgcgtttttggctatgaccatggcatcaacaacgccgtaacagtagccgcgcggcgatattttgataacgtccaatgtagatgtcctcctatcaaaagtgagtgtagaggcaatataaaaagccgtagttaaacggctcaaatcttgcattcttctgatctcattatagctaatctttcgtgagatatcaaagaatgttaaatatataatttcggctttgatctgcccgatgttctttttggacgcggctgttccgctgagtctgcctgtgcggcgtctttttcttttgaagcggatgctttttcagacgtcttctttgatgtgttggatgaggcgtctgatttgttttcatcttctgtttcatctgttttttcagcttcatcctttttatcctgttcgtttgtttcttttgtctcgtcagattcattctcatcatcgctgctgcttaattggctgtaaagcttcatcatggcgggcagactccgtactaaaggaccgtactgctgaatcatcggtgtaacctgctgcgccacgccgagcaccttctgaacgttgccgagcatgctcgacagggatgccggacttgccaggttctgtattccctgcagtcctgcacctgctcctccgctggccgccgccggtgccgacgcggcagcgcttcctcctcctgaaccgggtaaaaaacgggaaagcatcccttttaagccccctccgccgcccgtgcctgcgtttctcaggcccgctccggcaatctgctgctgagggaaaagctgccggccctgctgcatcagctgccggcccggcaatgacggtcttcctcccatcatcatacgcggattcatcaacggccggccctgctgcgccatatttctcatcggctgctgtggaaacatacttgtacctcctttctgtctctctgctattacaatatgcatcggagggggcatttgcttttctgtctcgaaaacaggattcccccaagacatggtgtttttaagtaaaatcggttataatgtgatgatggacacagaatgtgccgctttaaggagctgggaaaaatgaaagaaactaaatttgatggatacaacttaaaaccgtttattatagatgcagttcaccgccttggtttttatgaaccgacagatattcaaaagcggctgatacccgccgtgctgaaaaacgaaagcgtgatcgggcagtcccagacggggacggggaaaacccacgcctatttattgccaattttgaatcggattgatccgggttctgatacggtgcaggctgttatcacggcgccgacgagagagcttgccaatcagattcatcaggaagcgctcaaaatcacacagggtgcggaagatgagccgatccggacaaaatgtttcatcggagggacggacaagcaaaaatcaattgataagctgaaaacacagcctcatctcgtcgtcggaacgccgggccggatcgcggatctgattaaggcgcaggcattgaacgtctataaagcgcagtctctcgtcattgacgaagcagatctgatgcttgacatgggctttttagaagatgttgattatatcggatcgcggatgccggaagaacttcagatgcttgtgttctcagctacgattccggaaaagctgaagccgtttttgaaaaagtatatggaaaatccgaagtacgcgcatgttgagccgaaaagaatcacagccgaaaagattgaacatgttttggttccttctaaacagcgtgataaagacaagctgctttttgatatgatgtctcatctgaatccttatctgggcattgtgtttgccaatacgaaaaacacggctgaccatattgcgaaatacctgactgaaaagggcatgaggatcggtcttctgcatgggggattaacgccgcgtgagcgtaagaaggtaatgaagcagattaatgatctggaattcacttatgtcattgcgacagaccttgcggcaagaggaattgacattaaaggcgtaagccatgtcatcaactatgagcttccggacgatctggatttttatgttcaccgcgtcgggagaaccgcacgcgccggttcatcaggccaagcactgaccatttatgagctttctgacgaagatgcgctcgtaagactcgaaaagatgggtattgtgtttgactatgcggagcttgtaaacggcgaatggaagaaaggcgatgaccgccaccgccgcaaaaaacgcaaaaaatcggagaatgaggccgaccaaatggcgaagcgcctcgtgaaaaaaccgaaaaaagtgaagccgggctataaaaagaaaatgagctacgaaatggaaaagataaaaagaaagcagagaagaaacaaatctaacaaaggaaagtaggggactcgggttgctgaaaataggttcacacgtctcaatgagcggaaaacatatgctccttgccgcaagcaaggaagctgtttcgtacggggcgaatacatttatgatctatacgggcgctccccaaaacacgcgccgcaaaaaaattgaagacttgaatatcgaagcgggccgcgcccatatgaaggaaaacggcatcgatgagattgtcgtgcatgcgccgtacatcattaacatcggaaatactacaaatccggcaacgtttgagctgggtgttgattttctgcgttctgaaattgaaagaacggcagcaatcggcgcgaaacagatcgtgcttcatccgggagcgcatgtcggagccggggctgagacgggcatcaaaaaaatcattgaaggtttaaacgaagtgattgttcccggtcaaaacgtgcagattgcgctggaaacaatggcgggcaaaggatcagaatgcggaagaagctttgaagagctggccgagatcattgcggggttacgcataatgaacatctatccgtctgctttgacacttgccacacccatgacgccgggtatgatgtcgccaatgattttgacggtgttcttaacgagtttgataaaatcgtcggcatcgatcggataaaagtccttcatgtgaatgacagtaaaaatattaaaggcgcccggaaagaccgccatgaaaatatcgggttcggagagatcggttttgacgctctgcagtacatcgttcatcacgagcagcttgccgatattccgaaaatcctcgaaacaccgtatgtaggcgaagacaagaaaaataagaagccgccgtaccgttttgaaatcgaaatgctgaaagaaaagcagtttgatcaggagcttcttgaaaaaatatcagctcaataaaaaaggagggggaattgccccctccttttttaccctgagaattggttgaaaagttcgtcaactttccgagctgtttcttttgaggttatcgtttctacttttttcagcaggcgaagccgctcctgttcatcaaaaatattgatgttttttccgtgcatcagagccgctacctcagccgcttgacttctcgtaatgctgattccgtattgcttggaatatttcagaagatcgtccgcagtgacttgattgagccgctgcaaaataattctttgtattaaaatcatcgatactttcacctctttagacataatgtattgagcaaatcattaaaatgttacggcttttaatggtaaaatgaagttgcttactgtttaaaatagttattacaggaaaggagattttatgaccccaaataaacagcataaaagagagtcatttttacactttatcttcagggtcattatgattctgatcggggcgggttcagccgctgtaagtattgaattgtttctggtccctaataattttatcgacggaggcattatcggtgtttcattaattttagaccacctctttatgtccaatcccctcctcaatttcgccttattcgttgtgttactcaacattccatttatgattttcggatataaatatatcggaaaaacatttctcatctctactgttatcggaattgtcggtttagcgctgattgaatcctccttgcaccatgtggaggccattacgacccagcctattttggcgacggtattcggcgggcttttgctcggtttcggggtaggccttgtcatccgaaacggaggctcgatggacggtactgaaatactcggtatccttctcacaaaaaagctgcccttctcagtcggagaattcgttatgctcatcaatgtgtttatttttatttgggccggttttgtgttcggtccggagcaggcgatgtattctttcatgacttattatattgccatgaaaacgattgacgccgtcatccaggggcttgatgaaacaaaagcggtcattattgtggcagatcagtatgcggaaatttcagacgcaatcttgcatcggcttggaaggggaaccaccaagcttcagggaaaaggcggatatacggatgaatccaaagaagtcatttacgcggtcgtgacaaggcttgaagtgactaaattgaaatccattgtgtttgaaattgataaaaacgcctttattacgatcatgaatacccatgaaacgaggggcggtaagttcaaaaccgcgattcactaggctttcatttacttttcatcattttataggtataatttgatacatcataagaaaatggcctgctgttcagacagctgccattttctttttggagcgataccgtgttgtaaaggggaggtcctcatgaacgtacaagaagcgttgaacctgctgaaagaaaaagggtataaatatacgagtaagcgagaagacatgctgcagctttttgctgattctgataaatatctgaccgccaaaaacgtgcttgccgcattaaatgacgactatccgggtctgagttttgataccatataccgaaatctttcgttatatgaagaactcggcattttggaaacgacggagctttccggagaaaaactgttccgttttacatgctcttatacccatcatcatcaccattttatctgtttaacctgcgggaaaacgaaggaaattgagtcctgtccgatggataagctgcacgatgatttggaagggtatgaaatcagcggccataagtttgaaatttacggcacctgtccggcgtgccgataaaaaacctcctgctatatacaggaggtttttttcagcttttaacatgctgaaagctgtgtttgtttttattaatccaggcgacggcttcaagccaattatgcaccctgataatattggaatcgatggggagctgattatatggggagttaaaaaggataaccggaatgcctgcttcttttgcgatcattgtcgcgttgccgtggtgatcttcgaaaaataaatcaatgccgtgttttttgacggcttccactttgtgatggcctccgacaagctcaatgtgatcgtaatgaatgtcccggtttgcaaaccagtccagcgtaacatcttctaagtggccgcgtcttgccgtaatgtagataagacggtgctcttctttcagtccgtccagtgcctgcttggcaaattccgcgagcttcgcttctttatatatggctgcttcatgaacgttcatccattcccaaaattcctcgtctgtaatgttcaaaagcttcgtcagatcataatcagtcatatcatccaaggtaatggaaagatgaaatgagcggtttaaataagggacaaatgtatcctgtgccgtaactgtgccgtcaatatctatacctaaccgtaacatgtccacactcctataaattcatcccttcaagtgtaacataaacaattaacaataccagaaaagtttagcaaacatgaatccgtaaaaaacgcggaaactaaaaaagctcctttcataaaagaaaaagggggaattgaaggtggcatacgattacgaaaatcgaaaaggcaacgactattacgtggatcatggatcggaaggaaccgatatcacgcgtgatgtttattcagaagaaacagcggccgaaatctcagagccatatcgtgcttctgaccgggcagcagaccgtgatgataatcgggacggagtaagtgaaggccggggatagggtatgcagcattggctatttctatcatttccctgtttgtgctccctgttttattaggggcatgcggcattatcgtcggctatatcgccagaagaagaggagcaggcgctttaggcggatgggcgatgggaatcggtattgtttcccttgtgcttggcatcttcattacaccgtttttttaacacaacgcaaaaaaaaagcttggcggaatatccgtcaagctttttgtgtttcttgttctgcttttgctttttctgcttcaagctttgcatagtgttcttctgccagcttgtcgatttcttttttgagctcttcgaccattgtttcttcagggactttgcggacgatttggcctttgcggaaaagaagtccttcgccgcgtgcgccggcaatcccgatatcagcttctcttgcttcgcccggtccgttaacggcacatccgagaaccgctactttaatcggcgctttgactttagaaatgtattcttccacttcatttgcgatgctgatgagatcaatttcgatccgtccgcatgtcgggcatgaaataagcgtagccgcgtttgaagcaagaccgaatgatttcagcagttctctggctacttttacttcttcaacaggatcggcgctcagagagatccggagcgtgttaccgattcctttgcttaaaatcgctccgagtccggccgcgctttttaccgttccggcaaacagcgtgcccgattctgtaattccgaggtgaagcggataatcaaatgcttttgacgctttttcgtatgcttctatggcgagattgacgtcagacgctttcatactgacgatgatgtcatgaaagtcaaggtcttccaggattttgatatgatgaagcgcactctcaaccattccgtcagcagtcggatagccgtatttttctaaaatgcgcttttccaaagatcccgcgtttacgccgatccggatcggaattcctttttctttcgccgcttttacgacggcttccactttttcgcgacggccgatgtttcccggattgattctgattttgtcggccccgccctcaattgcttttaatgcaagcttgtagtcaaaatgaatatcgacaacgagagggatggaaatttgttttttgatgtcggcaatcgcgttagcggcgcgttcgtccggacatgccacccggacaatttggcagccggcttcggctaaacggttgatttccgcaactgttgcttctacgtcgtgtgttttggtcgtcgtcatactctgaatgacgacttcgttatttccgcctattgttaaaggtcccactttgacgggacgcgtttttgtacgatgtgtgatttcactcacttgtcaatcgctccttaattgtagttaccgcttttgcaggctgagccttttacatgtcaggcaacttctatttacatgttatattgtaacagtgtatttgccgaactgacaagaaattaacgtttaattgcggtagacggggaatttataagcggtgcctgcctgaatggcgtttgcttttacattcggattcagcgcttcaaaatcttgtgcaatatcatctggcgctttatgtgcgccgactatcgacatcaccgtatcgccttttttgaccgtaaccgttctgtatgaagcttcctgttgggctggctgtgccgccgctgcgtatgctggaaggtcttgagaagggatcgtgccgattttaagatcgtaaaagataatgaatatcacaaataaactgccgaatacaaaagtaagccgcttcattccaaccgcctcccgcatacatttttacttcattgtatgcttgtcccattttgttcatgacaaaaaagaagaccgccgggggcagtctttgttatacatctgttttacttcgcggtatctcttttaagacgaggaaaaggatgataaagtttacaaaccaattcactaaaaattcactcggcaccgtaataacaagcgcgcgcatgatcgtaaagaatacggtcgaaagtgtaatggaataagccgaaagcttccagagctgctggtaattcaatgtctttctttgcgcatttttcaatatcaggccgatgacggcgagaaatgatacttcaatgaatttgcctgccgctgtcatgatgaacagcaaaacggacaggacggtgacgatcattgttttattttggtttaatgctgatatgatttctttttttgtgatatcggcaggcatcagcgaataattcatttctgtcgcttgtccgtctacagcaagcaccattttatttttcaaaatgccgatcgcattttgtttcgccgctatttgtttcgcgccgtaagcatctgtgggatcaaagacgatgacgaacccgttcgcttccgtttccttagaggcggacgctttcgtctgcaattctccgtttgaaatgctgaaatcagggaaatctttctttaacacggttttgaaaccgttcattgagtttacggtgccggagcaaaggtaataagcgcttggcagcgtaaaaaggacagacagcaaaaatacataaaggatcgcttttcctatcccctgaaaccgtgtttttgcaatatctgccggagagtatgtacttttcaataaagccgtaaatatgttcaacatcttcacttcctagcctaaactggtatatgttgcttattgtatcgttcacaggggatgaacacaagtgagagtatttaaagcggtgataaggaatcatacataataagataaagcgggaagcggtgatcgcccgcaaaacaaaggagggtgtttttgtcatgagtgttttgtattggctgattatcattgcggtcttcatcattgcttttatcgggcttgtatatccggtgattccaagcgttatttttattgtggccggttttcttctctacggatttttgttttccttcagtccttattcttacctgttttggctcattgaggcggtatttgcggccgttttattcgcagctgattatgtgtcaaatttacttggcgttaaaaggtacggaggaagcagggcggcaatctggggaagcacgatcggattattgatcgggcccttcgttattcccgtggcaggcattatattagggccgtttatcggtgctgtctgcgctgaggtgtttgttcatcaaaaggatatcaagtccgcggcaaaagtggggctcggctcgttaatcggttttttaacaagcgtggcggcaaaaggcgtcattcagctctttatgatcggatatttcttatggacggtgctttagaaaggtttaatttcggcagggaacggataaagtgtaatatgtctgctggaatcgccggattgtgagctttttcattgattaccatgctttcttttgttacattgagattagaaaagttcgcgttaagcggcatttcagtacatatatttaaaggaggaaaaaaattatggcttacaaacttccagaattgccttacgcttatgatgctttagaacctcatatcgataaggaaacgatgacgattcatcatacgaagcaccataacacatacgtgacaaacctcaacaaagcgatcgaaggatcagcgcttgcagagaaatctgtagatgagcttgttgctgatttgaacgcagtgccggaggacatccgcacagctgtccgcaacaatggcggcggacatgccaaccactctttattctggactcttttatctccgaacggcggaggcgaaccgactggtgagcttgctgaagagatcaaaaacacgttcggaagcttcgatcaatttaaagaaaaattcgccgcagcagctgccggccgtttcggttcaggctgggcttggcttgttgtaaacaacggcaaacttgaaattacaagcacgccaaaccaagattcaccgctttcagagggtaaaacacctgtcctcggtcttgatgtttgggagcatgcgtactacctgaactaccaaaaccgccgtcctgattacatttcagctttctggaatgttgtgaactgggatgaagttgcccgtctttacagcgaagcaaaataaatagttcgatcaaacaaggtctcccgcgggaggccttgtttttttattgactttgaatccttttacatatctcagtttgagtgagacaaactaatgtgtagtaaaggggagtcaatgatgagcaaaataaaaaaaattatcggcgacatcgaaataaataaagggctgctgctgttattgacgattggcggcctttactcattgggcatcgcgctgtcaaatacatttgtcaacgtgtatttgtggaagcagtcgggaaaatttattgatttggccatatacaatttgtcggtcgtaacgatgcagccggttacctttctgctggccggccggctggctaaaaaaattgacagggtgtttattctcaggttcggcgttatctttttggccgctttttatttaagtgtgctgcttgctggagaaactgcggcttcccgtctcgttttgataggggccgtgctcggagttggatacggcttttactggctggcttttaatgtgctgacgttcgaaattacggaaccggaaacgagagatttttttaacgggtttttaggcattttgtcttcatcggcgggcatgatcggtccgattgtggccggatatgtcatttcaagacttgaaaacaatacgggttatacaatcattttcagcctgtcgctcggcttatttgcccttgccgtggtcatgagcttttttctgaagcggagggagtcgaaaggccggtttatgctgaaaaaagtttttgatgagcgccacacgaatctgaattggcgccggattaccaacgcgcacttttttcaaggcttgagagaagggatttttgtttttttaatcagcgtttttgtattcattgcgacaaacagtgagctggcgctcggaacattcggtctcgtcaattccgcggtttctttttttgcctattattttgcatcaaggctcatcaaaaaaagagctcggaaaaaggcgattcttatcggcggattgatcttgtacggtgccctgtttcttatcatttttaaaatgagcttcacgacgctccttttgtacggagtgtttattgcgatcggctatccagttctgctcgtgccgtatgtctcgcttacatatgatgtgataggccgggcgcggcttgccagaaaagccagaattgaatacattgtgctcagggagttatttttaaatgcgggcaggatcgtttccatcctttgtttccttgtaatcgttacattattcaaggaaaaagtgggaataccggcggcgctcgtgctgctcggagccggccatccgctgatttattactttataaaagacatcagactggatacggaaacttctgatgaaacagtagaagaagaccgacaaaaacaggcggcggaaccgaattttataaaaggagaaagataaaagggttatctgtagaaaaatatcgaaaaaacctttagaatgaaaaatgacacctgaacagaaggtgtcatttctttctgtaaataagaaaaggtgatgtcatgaggagaaataaaaagaaaatagctgtaaacaaagaaaagaaaaaatcactgccgatccggcttaattttttgtttttggccgcgtttcttattttcacttggattatcgtcgagcttggcatcaagcagatcgttcagggtgatgattataaaaacgccgctaataagcaggaggagtctgatgtcagcacggcggttccgagagggaaaatatacgaccggaacctaaatcccatcgtaacgaataaagcattaaatgcgattacatatacacgttcagcctcaaccacccaggcgcagcgtttaaaaatcgcaaaaaaactgtcgggtatgattaaggtaagcaccaaaaaggtgactgagcgggataaaaaagactattggatgttaacgaggcctgatgaagcgaaaaaactgattacggccgaagaaaagcaaaaagctgaagacaaaaaactgtctgaagatgatttatatcagcttcagctgaaacgtatcacagacaaacagctgaatgagctcacttcaaaagatatgcagatccttgcgatcaaaaggcagatggattcaggctactcactgacgcctcaatacatcaaaaatgaaggggtgtcggcaaaagaaatggccgtcgtcagcgaacatttagatgaactgccgggagttgacgtgacgtctgactgggaacggtcttatccttataaaagcctgatccggacattgctcggcagtgtatccagtgcgaacgaaggtcttccttccaatctgctggatcactatctgtcactcggctacagccggaatgacagggtcggaaaaagctatttagaatatcaatatgaaagcctgctgcagggtcaaaaagagaaagtgcagaacttaaccgactcatccggaaatgtcacgggcagcaaagtgatttcaaaaggacaggccggcaaagaccttgtattatccattgatatggacctgcagaaatccgttgaaaaaatcattgagaaaaatttaagatcggcaaaagcgagaccgagcacgaagcttcttgatcgggccttcgtcgtcatgatgaacccgaaaaacggagaagtgctgacgatggccggcaaacagattacgaatgatcatggaaagtacaaaattaatgattatgccctcggcgcaatgacttcctcctacgcaatgggatcggcggtcaaaggagcgacggtgttgaccggactgcagacgggcgcgattaatttgaacaccgttttccaggatgaacctatgtatttcaagggaagtaaaaacccgaaaaaatcatggaccaatttaggtcccgtagatatccaaaaagcgcttcaggaatcctcaaacgtgttcatgttcaaaacggcgattgctgtcggtaaaggggagtacaaaaaaggccagtcccttccgcttgatatgaaggcattcgatactttcagatactacttcaatcagttcggactcggagttaagactgggattgatcttccgaatgaagcaaccgggtaccaagggacacagcgaatttccggtcttctgttagactttgccatcgggcagtatgatacgtttacaccgctgcaaatggcgcagtatgtatcaacgatcgccaatggaggctatcgtttgaaacctcagcttgtaaaagaggtcagacagcctgattcgaaaaaaggaatcggagccgttgtagagtctgttcagccccaagtactgaacaagattgatatgaatcatgcagacattaaagaagtgcaggcaggtttcagacgtgtcatgacaaaagggacagccgcaactgattttgcgacggcgacatacagtcctgccggtaaaacgggtacggcgcaatctttctatgacggtcctgacaaatcagagacgggtgaaggaacgtataatacgactcttgtcgcgtatgcacctgctgataatccggaagtggctatttctgtagtcgttccttgggcctatattaattacagcgatcgatattcgattacgaatgatataggaagagcagctctggacaaatactttgagctgaaaaagaaacaagaagataataatacgaagcagaaaaacgaagataaaattcaggaagacgctgaaaacggcaatacaagcaactaacagaaaaacgctcacaacctgtgagcgttttttttatacaaaaaaacatccggatttacaaaaccttaacacttgatttatacgcattttacaagaaccctttactctatacgtgtaggacaaattacacattaaatgcagggggaattcaggaaatgaaaaaaaacaaatggatgcttatgcttctgatggctgctgttatgattgttgctgcagcatgcggaaatgcaaaggaaagcggcaagacagacagtcaatctgcaagtgaggataaaaaagcatcaggttctttaaccatttctggttcatcagccatgcagccgttagtactggcagcggcggaaaagtttatggaaaaacatccggatgctgatgtgcaggtgcaagcgggaggttcaggaacaggactttcgcaagtgtctgaaggggcagtgcaaatcggcaactcagatgtcttcgctgaagaaaaagaaggcattgatgcgaaagccctaaaagaccaccgagtagcggtagtggcgatggcggctgcggtcaaccccggtgcgggcgtaaaggatataaccaaaaaacagctgacagacgtctttacaggtaaaattaaaaactggaaagagcttggcggtaaagatcaaaaaattacactcgtgaaccgtcctgattcatctggaacacgcgctacgttcgtcaaatatgctcttgacggagcagagcctgcagagggcattacagaggattcctccaatacagtcaaaaaaatcattgcggaaacgccgggagcaatcggttatctggcattctcttatataaacgatgacaaagtaacgcctttatcgatcggaggcatcaaaccggaagagaaaaacgtcgtcacaggcgagtatccgatttgggcttacgagcactcttatacgaaaggtgaagcgtcaggccttacaaaaacgtttcttgactatatgaacagcgatgaagtacagaaaagtatcgtaaaagatcagggctacattccgatctctgatatgaaagtcacacgtgacgcaaacggcaagcaaagctgaggggagggcgggctccccgcctcttcttctttataggagtgtaaacaaatgataaatcacagagaaaaagagtctgtaagcgaacgcttaataagctcaaaacaaaacaggcaattggatgaagtccgcggaagggtgattgtgtctgtgtgtgccgcgattatcattgcggcatcagcggcgatcacaatttttctcggcataaaggggctgcaatctttttttgtaaatggtgtaagcccgattgagttcttaacaagtctgaattggaatccaacccaggcaaaacctgagttcggcgcgctgccttttattttcggatcatttgcggtcacgattctgtccgctctgatcgcagcgcccctcggtattgcgggtgccgtgtttatgacggaaattgcgccgacttggggaaaaaaggtgctgcagccggtaattgagctgcttgtcggcattccgtccgtcgtttatggattcataggtcttacagtattggttccgtttatcggctcttttaaatcaagcggaacgggtcacagccttctggcggggacgatcgtactctcggtaatgattctgccgactgttacatcgatttccgctgatgcgcttgcgtcacttccgaaacaccttcgcgacggttcatatgcgcttggggcgacgaggtggcagacaatcagaaaggtgcttatcccggcggcgtttccgacattgctgaccgctgtcgtgctcgggatggcaagagcgttcggagaagcactcgccgtacagatggttatcggaaatacaaagcttctgccggaaagcctgcttgatacggcgggaacattaacgacgattatcacgttaaacatgggccataccacatacggcagtattgaaaataatacgttatggtctatggggcttgttcttctcatcatgtcgtttctgtttatattgctcatacgctacttgtcatctaggaggaaagtgtaatgaaccggaaaataacggataaattggccaccggtgtattcgggttatgcgccgctgtaatcgcggcgattttggcaggattgtttttgtacattcttattcacggcgtctctgaaatctccttgcgttttcttacgtcaaaatcgagcgccattgcctcaggcggcggaatacgggatcagctttttaactccttttacattctgtttatcaccatgctgatcacgataccgcttggtgtggggggcggcgtctttatggctgaatatgcgccccaaaataaaatcaccgattttatcagaacgtgtattgaggtgctgtcttcgcttccgtccattgtcatcgggatgttcggcatgctgatgtttgtaaacctgaccggatggggctacacgattatcgggggcgcgctcgcattaacggtctttaaccttcccgttatggtccgggtgacagaaggcgcgctcactgcagtccctaaggagctgaaagaagcttctctcgctttaggcgtatcgagatggcataccgtcaaaacggtgctgattccgagtgcgattccttcaattttaaccggagccattctggcatcaggaagagtattcggagaagcggccgcattgttatttacagcggggctgacaacgccgcggctgaactttacggatttgaacccattttctgaatcatctcctttcaacattttcaggccggctgagacgctggcggttcatatatggagtgtcaatacgcagggaatcatccctgacgccgaagcgattgcaaacggcggctcggcggtgctggtgatttcggttctcttgtttaacctttctgcgagatggctcgggtctgtcatttataaaaagcttacggcaaattaatcggaaagaggcgaaaacatgatcgatcacatcatcagggaacaagcggaacagacaaagcgtttgccggagtcttcgattttggaagtgaagcatttatcaatttattacggtgacaaacaagcggtaaaagatgtaaacatgaatattgaaaaacatgcggtgacggctctgatcggtccgtcaggctgcgggaaatcaacatttttgagacagattaacagaatgaacgatgccattgcttcggcaagaagcgagggagagatcctttatgaagggctgaatattttgggtgaagcgattaatgtcgtgtctctcagacgggaaatcggtatggtgtttcaaaaaccgaatccgttcccgaaatccatttacaataacatcacacatgcgctgaagtatgcgggggaacgcaggaaagccgttttggatgaggcggtcgaggaaagcttaacgaaggcggcgctttgggatgaagtcaaagaccggcttcattcatcggctctgtcgttatcaggcggccagcagcagcgcctttgtatcgcccgtacgctggcgatgaaacctgccgtgcttcttttagatgaaccggcttcagctctggaccctatttcaaacgccagaatcgagacgcttttgacagaactgaaaaaagattattcgattattatcgttacgcataacatgcagcaggcgctgagggtgtctgaccgaacggctttctttttaaacggggaagtggtggaatacgggcagacagaacaaattttcacgagtcctaaagcgcaaaagacagatgactacattaacggaaagttcggatagggggaaggactgtgagtcttgtgaaggaagcggtgcacacacagaatttatttgatattcacggcatgaacgtatggtacggagcccatcaggctttaaaagacattacgatcggttttgaggagcggaaggtaactgcgatcatcggtccgtccggctgcgggaaatccacttttattaaaacattaaacttaatgctgcaaatggccccgaatgtcaaagtgacaggcgacatgatctataacgggcgcaatctgctgaaggaaaagacggatgcggcagaattaagaaaacagatcggtatggtgtttcaaaaaggcaatccgtttccccagtcaatatttgagaatgtcgtgtacggtccgagaattcacggcgaaaaaaataaaaagaaactgcttgaaatcgccgaggaatctttaaaagcagctgcgctctgggatgaagtgaaggatcgccttcaccaacaggcgctttcactgtcaggcggtcagcagcagcggctgtgcatcgcaagagcgctcgccaccaaaccggacgtccttctgatggatgaaccgacgtccgctcttgatcccgtgtccacgcggaaaatagaagagctgattttgacattgaaagaaaagtatacaatcgtcattgtgactcataacatgcagcaggctgcgagggtctctgatcaaaccgcgtttttctatatgggcgaactggtggagtggggcgatacgggcaaaatattttctcagccggatcatcaaaaaacacatgattatatcaccggaaaattcggatgaaaaaaacgggcccggccattaaccgggtccgttttatatgtctattaaaaaagcctgccggccgtatccatctgaatggacgatgcctgcaagcttttttagcgggttaatgttttgacgatttttttaaagctcatatctgaatcgactttgaaatggccggcgcggatttctttgtggtagcctgcgtcaatgacgtaatcattgaagtctttcgctgaaggaataatcccttctttttcaagaatggatgacacatcagcagtgctcattccgtctttaatcgtcagtttgtatgttacttttttctttttggcgtctgtgttttggtcgttgtttaacgatttttctttagaatcaagcagtttttgatagtcatcccggttgacggagactttatgctgatcgtcgaggtagctgtttacttctttttctgtcaatgctgttttttcggttttaacggcggctgcctggtcatggtcagtcaaatagaagacagcggcgagaacggccgtcgctaaaatcatgcctgctgcaaaagcctgaatgccccgttttgtcatacgagcaccttctcattatctttaataatggtattgacgtcctcgacagacacgtgctccgcttttgcgatggcttccgcagacattccgttgttatattttgaaatgatttgtttggcgattttttggtttatgccgctgcttttggctttgcggatcacgaggttggtttccagcaattcttcttcaagcaccgtcattttctttttcaacttgtaaatttcctgcatggcggaaagctgaagcgtttctagctcctgttccacgtctttcatcggatctctttgagaatatgagaatgcaataagcgctatactgacgataaacaacgcaataatagcaatttccacgtttcatcaccttctattattaatttgcccttcttttttataccataaaacgccgccattctaaaggaaatagagaaaaaaacggaattttgtcggaaaatcttttttactcggggagcaaacggttatttctctatagatttcgtatcagaaagcccttttttgtcctgtttcgtcatattttaccttcttctgacgcaagctcattcagaggatcagaagcgtaaactgatgttttctgcacttaaacaacatttcatgtaaatcagctctagcattccgtccattatagtggtattatatataagtctgaataagtaaatgatatttagtttggagggaaaataatgcgcgttaatattactttggcttgcactgaatgtggtgagcgtaactatatttctaaaaagaacaaacgcaacaatccggaccgcgttgaatttaaaaaatattgcccacgtgataaaaaatctacgttacaccgtgaaacaaaataagctgtttaacacagcggaaaaagctggagctttcaataaagttctggcttttttgtctttcagggaggtttgagaaacgtgaaagcacaaatcagaaccgatataaaagcaaagctttctgacatgacagaaagtgaatgggagaaaaaatgccgcagcatgcgtgaaacgctgttttctttaaaagaatggagacaggcccgcgtgatcgccgttaccatctcgacacgcctggaaattccgacacggccgattattgaacaggcctggcaagagaaaaaacaagtctgtatcccaaaatgctttccgcagacgggagcaatggagttccgtacattttctgcgtatgatcagctggaaaccgtatatgcgggcctcagcgaaccgatcgagagtctgacggaaaaagccgcccaaaatgacattgaccttgtgattgtgcccggcgtggcttttgaccgggaaggcttcagaatcggatacggcggaggatattatgatcggtacctgtccggttataaaggccgtaccgtgtcgcttctctttgactgccagctgacagaccgcattccccgcatgccccacgatattccggtcgatatgatcgtgactgaatctgaaaccatcgcttaatcgcataaaaaactttttgcaccggaataattctcgctgtttgacaaacgataggggcaggagggataagatgaaaaaattgttgatctactcattatgcgccgtatctgttttagccgtttaccaaaaccgctaccgtctgatgaacagcgtgctcagccagccggggatcagacggacattcattcatttctttttaaaaataccgtttatcagaaacaaattcattcagcaggcattttaaacaaatcccgttttttaagcgggattttttgcataagaaaacctgccggtaaaaaacggcaggttttctcgtattgtcagctttttttcaggaaaccgagcagaattgagattataggagaaatgtacaggaaaaaggtaaacggcaggtagtcgacgacggaaacccctaatgcgcttgccataaaagcgccgcttactccccagggaatcagcgggttgatcaaagttccgccgtcctcaagcgaccgcgcaaggtgaatccgcttaatgccgagcttgtcatataaaggtttataagattgacccggaattaagatcgacaaatactgctcacctgtcgcaaggtttacgcctatacttgagaagacggtcgccatgacaagacgtcctttcgtatgcacgccttttatcaatccttgaagcagcgccgcgatcaggcccgttttttccatcaggccgccgagcgcaaaggcgatcataatcagagagactgatcccatcatcgattggagcccgcctctgttgataatgctggccacagcctggtcgccggttttaaacgccgtcccgctttgcagggcggatataaatccttgaatgctgctgtcaggaataaaaacagcagtcagaagccctgcggaaataataccggcggtaagcaccggaatcacggaaacccgtctcacagctaaaatgatcactaacagaggtgaaagaagcgaccaaggcgtaacgtgcacggcctcttttattccggaaatgaccgcctcaatattttgcgttgaagcggcatttattgaaacagatgaaccgagaatataaaaaagaacgatcgtgatcagcagtgccggaacggtggtgcccatcatatggcgaatatgcttaaaaatcggaatttcgccgattccggcggcaaaattcgtcgtgtcggacatcggtgacattttatcaccgaaacaagctccgcaaataactgctcccgccgtccattcgagcggaactcccgccgcgcttgctacccctaacagcgcgacgccgattgtactgacagttgtcagacttgagccgacaagcgtgctgataatcatgcaggaaaataatgcggtcaaaagcagctgactcggctgtataattgacaaagcgtaaacggtgacggtgggaatggcgccgctgtacatccaggcgccgatcagcacaccgatcaaagccagcacgataatcggctgcaccccgttttttaatccgctgacaattcctttttcaagactctcccacgagaaaccgagccacaaacctgccagagacagaataatgacgcaaaagaacagcggcatatgcggctctgtatgaaagaaaaacaggcaggaaataatgactgctaacatcaagacaaataaactgatggctgagatgaacgtcagccttttttcttgtttcaaaacaacaccccatcaaactttaatccttttgtgcttttgggcacgaaagtattgtaacagaaaaacgcataaatgagtgtttttttacaattgtgaatatacaatttatgaaaataatacaaggatattttctccaatcgttttttgcttgacgcccggatcagtgatgaaatacgcttatactaagaagaatagaaatggtgaagaagatgaattcattttatgacgtgcagcagctgtttaagtcattcggacatattgtttatttcggtgacagacaagccgaaattgactttatgaaagatgaattaaaggaaatgtacttgtcaaacgtgattgaaagagatttatggcaaaaagccgccggagttcttcagagagaatcggagcggatcagaggcagttaacacagcaggattttaataagaaaaggagattattatggaagatacatggtttgcggggattgatctgggcggaacaaccatcaagctggcctttatcaacatgtacggtgaaattcagcataaatgggaagttccgaccgataaatccggaaacacaattacggtcacgatcgccaaagcgcttgatcagaagctggaagaactgaacaagccgaaacggattgtaaaatggatcggaatgggagcgcccggacctgtggaaatgacgacgggaatggtctatgagacgacaaatatggggtggaaaaactatccgctgaaagaccatctcgaggcggaaacgggtattccggccgtcattgaaaacgatgccaatatcgcggcgctcggagaaatgtggaagggtgcaggtgacggggccaaagatgtcattttagtgacgctcggaaccggagtcggcggaggcatcatcgtcaacggagaaatcgttcacggtaaaaacggggccggcggagaaatcggtcatatttgcagtattccggaaggaggagctccgtgcaattgcggaaaatccggctgcatcgaaacgattgcgtccgcaaccggcatcgtccgcatcgcgaaagaaaagcttgcggcggtttccgactcttcgctcttacaagtgcgcgatctgacggcacgtgacgtgttcgaagcggctaaacagcaggataagaccgcgcttgaagtcgtcgattatgtcgcaaaacatttaggcctcgtgctcggaaatctggcaagcgccatgaatccgacaaaaatcgtgctcggcggaggcgtgtctaaagcgggggaaatcctgcggtcaaaagtggaagagaccttcaaaatcaccgcgttcccgcgttctgcggaagcggccgatatttcgattgcggcacttggaaatgacgccggagtcatcggcggggcgtggattgccaaaaatgaatggctcaaacatcaaaactgctgaagaaagtctgcctgcccatatcgcgggcggctttctttttttatctcccctgtcatatagtttttaaaaaagggggatgaacatggcgggaattcgtgtcaaacctgaattgaaacagcatatgaaagatattgcaaaggtgctttcaattgatgaaaaactgttgaaagccgctgataaaacggcggaaagcgatgaattattttgtcccggctttgccgtgagcgggcagtcagagggtccgccgcttgagacgctgagcgggctttcgcgatacatccggcactgtgaaagcgttctttccgctgatcaatgggtgaaggaagaaaaggtgtacggctccgaatcggtttatgaagaaattgagaaaataacggatgtctttccgtttgtcacatgccgtaaaatcggcagttccgtattgggaaagccgctttatgagctgaaaataggtgcggatacggccgaaagaaaagtccatgtaaacgcctcatttcatgccaatgaatggatcaccacctcggtcgcgcttaaatggtgtaaagaatattccgtggcattatgcgaaaataaaaccgttttcgggcagtctgtgcttgatatattcagccggacatcattgtcattcgttccgctcgtaaatcccgacggtgttgatctcgtactttacggatgtgaagatttatcagaaaaaaaagaattcctcaacgaattaaatgagcaccgcccggatttccgcgaatggaaggcgaatataaacggtgtggatttaaataaacatttcccatccaattgggatattgaacaaaggcgcaaaccgaaagccccttcataccgtgattttccaggaacggcgccgctcactgaaccggaggcgcaggcgatgcaccggctgataacggaacagccacctgaccggctgatcgcgcttcatacgcagggagaagagatttactggggatacgaaggatgtgaaccggagcaatcatcccagatgattcgggagtttgaagcgataagcggaaaccgctatcaaggcgttaaaaccattgacagccatgccggttttagggattggtttatacagcagtatggaaaagagggctataccattgagctcgggaagggaaaaaaccctttgccttttcatcagtttgctgatatttatcaagcgacggaaggtattttgtggaggtcgcttgttttttgagacatctgtgaaatttctcatttgtttacataaacaaatatgggacaatagaaaagaatggagggaaggctgatgagatacttggtttgtgttctgctgtccgcattcgttctgtgtttagcggcctgtgaaccatctcatcagcagcaagacacaggcgtttcggcaaaatcggcagaacagaaaatcgttccgctcagtaaaaaggaagcggaaaaaacggaaggatggctggataacagaacaattctgtatacagcacatcatcagctgatgaaatatgatcttttcagcggaaaatccgaacggctctatgaaacaaagggcaatattgtcaatgtaaagatcagccggaaaaaacagctgattctcgtacaggtgacaagcagcggtcagactgagcttgtgcttatgaacaagcaggggaaaagactttatcacaaagcctttaactcttatgagctggagacggcttggaatccgtatgacccgtatcaaatgatgattaccgtttttactgaaacatgggacttcacagcctatacggccgatatgaacaacggcattttaaaaaagagtcccgttcaggccccttttgtccattggacctccactgatgaattccaatatatcaagcaaggaaaaacggaggaagagggtcctttatattcttatgacttgcagacgaaaaaagaaaaaagagtgcttcatcacgtcatctgggctgattcccgcccgggcatgacgattgccgtcagaccaacggatcaatcggacggagacggcgagttctttttccaaaagccggcatccgtgacacaccgctttcctctccaaaaaaagtatgagagcttcgcgccgatggaatatgattacgatcagacacacaagcggttttacatatttaagcctgaaggccgctcttacaatctgatcagctttgacttaggagacgaacgggagcggacggtgctcaaaaacacggaaatggagccgattcagatctctccgaacggggaatacgctttatacggctttacgtatgaccgtctgatttcactgaaaacgggcatgacagaaccaatcataacaaatgaaaaaggagtttgaaccaaatggcaattgcagatgtcacaatcattccgatcggaacaaaaacaccgagcgtcagtgagtatgtagcggatgtgcaaaaaattttggagggttacaaagctgccggcaaaatcaaatttcagctcacgccgatgaacacgttgattgaaggtgagctgagcgacttattcgcagtcattcaggatattcacgaagccccgttccaaaaagggctgcacagagtggcgacaaatatccgcattgatgacagacgtgataaagaaacgacgctggagagcaaaatcaaaagtgtcagcaaacatttgcagcaataaaaaataagcctgtatccattggatacaggcttttaatgtgcagtcggatagccgctggttacaacggtcattacggtaaaccagccaaacacgcccagcgtggcggcggctaacaaaaatcccaggatatttctctgtctgacagcccgcaggactcctaatacagctaataatgcgacaaggccgaagattacaacaagtaacatcatgctcctcctttgtcattggaacctgaaaatctttccatttcattttaaccgttttcattttgtttgtcgatagcgttttcccggccgcattcattgaatcttccgcagaaaaccttcataataagggcatatacataaagaggtgatgaaagtgaaatggagacgaatgccggccgggccgattcaggcaaacgcgtattttcttgtcagtgaggatcagtcctgtcttatttttgatccgggcggggaagcggacaaaatcaacaattacataaaagaaaacaatctgaagccgctggccatcttactgacgcacgctcattttgaccatatcggcgcacttgacgaagtaagagacagatgggatgttcccgtataccttcacaaaaatgaagaaaagtggctggaggactcttccttaaacggatcaggcatattgcggggcatcgccgtaacggcacggcccgccgaacggctcatcgaaggcgacggcattttggacatcgggcctttccatttggagacattgtttacgccgggacattcaccgggaagcgtttcttattatgtgaaggacgcggatctggtgatttcaggtgatgtgctctttcagggaggcatcggccgaactgatttacacggcggaagtcaggacgtattgcttgattccattcatcaaaaactgctcacgcttcccggacatacacttgtgttaagcgggcacgggccggaaacggacatccagacagagcaggagcgaaacccgtttatcaatggtttttcactgtaaatgaaaaaagacagaccataatcggtctgtctttttctgttcagtgggttccgccgcccggtgtcataataaaaatagagtagtatgtaaatccggcgaaaaatacggttaagtaagctccgaaaatataaatatacatccgctcagtcagattcaaataagaaagaaatacgaaaaagatcgtctgtccaaaaaacaaaagagaagcgtctttcatgccccctagaaaaaacatgactgcaaatatccccgtccaaaatcctaacacccggaacatgcgattcattccttatcccctcccgagagtctatctgaagtttattataatagatcggcactcaaaatgtaaacattttcatgattatatttattgtggaatttatgtctttccctgtgttttatatcttatgccgttctctaaaaaagatccgaaaaatctttttgaaatacgtttagggaaaaaaagttcagggtacttatgttaacaaagagacggattatccgagggaggaatttttaaaaatgaaagaacttattttttattcatacccgagctgcacatcatgccgaaaaacgaaacattggttaaaagcccacaatgttgactttcaagagcgacatctattcagggagacaccgacaattgatgaattgaaacagatcttatcattaacgaccgaaggaattgatgaaatattggcgacgagaagccaaacatttaaaaacctcaacctcaacattgaagaaatgactgtaaatgaagtgctgaagcttttgactgagaagccgaaactgctgcggcgtccgattctgatcgatcgcaataagctcgttatcggatacaatccgggagaactgatgaagctgacgaagaaaaaaacggtacatcaatctgtatcataagagaaaaacgaagatccgctgatcaaatttatcagctaatcttcgttttttgcggttgcgggactgggctagctggattcgaaccaacgatcacggagtcaaagtccattgccttaccgcttggctatagcccatcggatgtaattacagtatgtgcgtccggcgccgatttatacatacaaagtaatttgaatggaggagacccgtgaaacatttgaatgaaacattatctcgaaccttaattgaagaatcaggtgaaatcacacgccagtggctgctcataccaaaatcggggcggccttcagatgatcagaaagcggaaatgcagcaccgtctgttaattgaaatcgttgccggcattttatcggaaaaagaaggcggagaagaggagctgacaaagtgggcgcttcagttcgcaagggaccgggccgtccatgaagtaccggtctatgaaagcgtcacgagctttaaagaattccggagattggtctggaaccgtatacagacatgctgcgaaacgatgtctgagaagcccggggcgaatgcggtattccattggggagagaagctgaacaaagcaattgaccatatgattgaagtatttacagaggaatattataaagtgacggttacacaattaaacgcccaaaaggaaatgattaacgaactgagcgcgccgattatgccgattgccgccggtattggaattttgccgcttgtcggcgaaattgatacctaccgggcaaaaatgattttggaatcggtgcttgaccaatgttcttcactccggctttcttatttatttttagatatatcaggtgtgccgattgtggatacgatggtcgcttatcagattttcaaagtgattgacagcacaaaacttctcggcatagaaacgacaatctcaggcatcaggccggaaatcgcgcagaccgtcgtgaagctcggcatcgatttttctcaggtgaaaacggagcagagtctggcgaaggcgctggcaaaaaacggatttatcgtaaaagaatcattaagatgataaaaagctgaatggccgggagggatttctccctcagctattcagctttgtcagcttcaatcgtcatgatatgatggctgtcgatttcttttaccgtaaatgtgtagccttcaaaatcaatggtgctcccgggcttcgcgtcaatatgctgagtaagaaaccagcccccagtgtatcgacttgatcagccgtaatctctgttccgagtaaatcattgacgtcactgatcagcaatttggcgttcaggagatagcggttcttcccaagcttttgaacggaaggtgtttcgtccgtatcaaattcgtcgcggatttcgccgacgatctcttcaatgatatcttccgccgttactaaccccgcggttccgccgtattcatcaatgagaatggccatatgggcgtgttcccgctgcattttaacgaacaattgataaatcggaatcgtctcaatcacatggatcgccggctgaatgtaagggctgagttcgtgttttgtaaacgccgctccttctgacaggaatctgaataaaacttcttttatattgatgatgccgactacatgatctttatctccttttacgacgggataccgggtatatttatttgttttgataatgtcccggagcatatgtcccgatccgctgtctaacggcaggctcaccatttcattccggggcaccataatttctttggcagtgcgcttatcaaatgtaaaaatgttatttacgtaatgcagctcactttttttgatcatgccgcttcgatagctttcggcaaggagcacccgcaattcctcttccgtataagccatttcatgttcggaagcaggcttcaagccgaacatggctgtaatcaggcgggcggaatgattgagcagccagatgaacggaaacattaacttataaaacaaaatcatcggtctggcagacaaaagtgtaatccgctcggctttttggatagcaaaacttttcggggcgagttcgccgatgacgacattcacatatgtaaccagcagaaaggcgatgatcaatgacagtacttgggcaaccgcttcgtgaactccggtctttaaaaataacggctgaagcattgctttgactgtcggttcacccagccagccgatccccaaagcggtgacggtgatgcccaattggcacgccgataaatattcatcgaggtgtgtaatgacatgcttggctgcttttgctccttttacatcttcctcaatgagctgattaatacgggagcgccttgctttaacgattgaaaactctatggcgacaaaacacgccgttaataatataaatagtacgatggcggatagtttgatgatatacaatgtaacgccttccgcgaaggaaggcttgcacctcccttttttcggaataataccactgtagaaagctgctcaaacatcgaacctggtttagcccgcctcatttacggtaataaaacaagaaagcgatactggaggatgacaagagatgaaggtacattcgggtgcggactggctgtggtaccagctcggtccgcatgaaaaaacggaagcgaaaaaaatgatccatcacaatcactggccgcaatgcgaaaagtggtttgaacatgaaaatcatataaactttctgcgctcagatacaaatgatcagaataatgaagcggttttcggatctttaatctatcatcaaggattagatgatgaaaaaaaccataccgtatttcacttttatattacgagagacttcttttttacgattaattttgatttttcgctgctgcgcggtgtaaaagaaaagcatgccacacagcagattcaaacctgtgaaaatccgattgaaggcttttttgttctgctgggagagctgatgaattcctatctgatcggactggatgaatttgaagtcaagcagcggacgctgaaatggcagattcatgatgacaacagcaaaggaatcttggaaaatgtgcataaactgcgccatgagctgttcatttggaaaggccttacactgggggctaaaaaagtggaaatggctttaaaagaagcgtttcttccgaaaaatgacaggcagaaagattacctcagagctcatcataagatggaaagagggattacatatatcaatgagtttgatcaggaactgagcaatctgctgcacgccgaggaagtcattacctcccaaagaggaaatgaaattgtgaaagccttgacgatttttacaactctctttacaccgatgacggcgcttggagctctctgggggatgaactttgataacatgccggagcttcattggaaatatgcgtatatctgttccatcgtgctcattattgtatcaaccctgctgatttatatttatttgcggcagaaaggctggacaggggacattttgagggagcatcaaaaaaaatatttgcggaaagaaaagaaacgctaagaagagcaggcatacgcctgcttttttgatggctgaaaatggccgaatggttccggatttcattcagtaaatcaatgtcagggggcttattttttatttttttgcgttttacacagtgtaaaacgcataatctctcctttgccggcttttgtgtatctgatttacaatacgtgcggaaggagggaagtcttgtgaaaaatattgaaacatacagcaggaacatcataaacgaggcctatacggcaagggcttcagatatacacattgtgccgagagaaaaggatgctttcattcattttcgcatcggccatgctcttgtgaaaaaaagagtcttaaaaaaagaggaatgcgtaaggcttatttctcatttcaagtttttatcggccatggatataggagaaagacgtaagccgcaaaacggttcattgtctctgccgcttccgacggaaaccgttcatttgagaatgtcaaccttgccgacaatgaatgatgaaagtcttgtcatcaggcttttgcctaagcggcagattccccctctggataaactgtccttatttcggggggcgggcgccgcactattgtcctttctgaagcattcacacggcctgcttctgtttaccggcccgaccggctctggaaaaacgaccactctttactcgcttgtcaactatgcaaaacggcatttcaaccggcggattgtcacgcttgaagaccccgtagaaacaagagatgaggatgtgttgcaagttcaggtgaatgaaaaagccggagtcacatattccgccggtttaaaagcgattttaagacatgatcccgatatgatcatcttaggggaaatcagagatgccgaaacggctgaaatcgcagtccgcgcggccatgacgggacacctcgttctttcaagcctgcatacaagagatgctaagggcgccatatacaggctgctggagtttggggtgaacatgacagaaattgaacaaaccgtcattgccattgccgctcagcgtctggttgatttaacatgtccgttctgcaaagaggaaaactgttccgtgtactgccggatgtacaggcagacccgccgtgcgggcatttatgaactgctctacgggaaaaacctcacccaatgctttcaggaagcaaagggagagcacgccaattttcaatatcagacgctccgcaggctgatcagaaaaggaatcgcgctcggctatgtcacaaccgacaattacgatcggtgggtgtatcatgaagcggattaaacgaacctggccgttgaaggatcaagcggcttttttgaaaaggctcggtgaaatgacggaaaaaggatacagtctgattgaagggctcagactgctgaaactccagctgcataaacgtcagcttgcagagctgacggacggaatccgcaggctgagggaaggtgatgcgttttacgaagtgcttgaggcactgtcttttcataaagaagccgtctctatctgctatttcgcggagaaacacggagaattgccgggggcgatgaaacaaagcggcgatttgttacagagaaagctcatgcagacgaatcaaatcaaaaaaatgctccggtatccgatgtttttaatttcttccgtctgtgtcatgttttatatcctgcaaagtttaattattccgcagttttctgggatttatcaatcaatgaatatgaatacatccggtgcgactgctttcatctttgcattttttcggcattttcatgaagcctgcgcactggcgctgtccgccgctttctgcttgtttttgtacgtttggttcttatgtaagaaaaaatccccgcaagataaaatgctcattgttgtgaaaatacccctcttgggaaaagcggccgttctttttaacagctactttttctctttacagctcagcagtcttctgaaatccggcctttctatctatgacagcttaacagcttttaaagaacaatcttttctgcctttttatcgtgaagaagcagagatgctcattacacgtctgaaagccggagaaaccatagaatccgctctttccgggcatccgtgttatgaaaaagatcttgcggctgcagtcagccacggacaggcaaacggcctgcttcaccgcgaactttatacgtacagccagtttatgatggagcgtcttgaacaaaacgcggcgaagtataccggcattctccagcctgtcatttacggtgttgtggccggtatgattttaattgtctacatgtcaatgctgatgccgatgtaccagatgatgaaccaaatgtaagggagtgcttcgtctgaaaaatcaagatgggtttactttaattgaaatgctgatcgttttatttatcgtttccattctgcttttaatcaccattcctaacgttacaaaacataatcaaagcattcagcataaaggctgtgaaggactgcagaatatggtgaaagcccaagtgacggcgtacgaaatcgaccatgaaggtaaaatgccggatatgaacgatttacaatcagaggggtatatcaaaaagaatacagcctgcccgaatggtaaacagatcttaattagtggcggagaagttacagttgaacaataacaggcggacagaaaacgggtttacccttcttgaaagcctgattgtgttaagcctggcgtccgtcctgctgacggttttgttcacgacggttccgccggtctgcacccaccttgccgtgcggcaaaaaacagaacagcttcaaaaagatattcagcttgcgcaggaaacggctatcgcagaacataaaagaacaaaaatcacttttcttccaagagagcataaatacaaactgcagtcagccggaaggattgtcgagcgttcttttgattcgcttcacattacacttgtgactttaccggagagccttgaatttaacgaaaaaggccatccgaattcgggaggaaagattcgattgaagagcgccgggttcacctatgagatcacagtttacttagggagcggaaatgtccatgctaaacggaaataaagggttctctactattgaaacactatcagcaatggccatttggctgttccttatgacgtctatcattccggtctggacaggcatgctgacagatggtctgaaaatagaagatcgccaggaagcgtatcagcttcttcagaaacatatcagcacttatatgatgaccggaaaaaagccgccgtctcccggtgtgaagtggaagggggatggtgagtattacaaagtgtgtgcggctgaccgcggcgaaaaagaaatgtgcctcagcattctcaaaacagactggctttacgcttcttaatgttttgttctccttggcagtctgtcttttcctatcaggcaccctgggcccgattttacatctgtttttatcaaaccggaccgataacggcggattagacagccgggagcatcaaattgccgttcagcagatcatgaacgaatgtaaacaggctgagactgtgaagccggcggacggcggattggcgttagcatgccggaaaacagggggcgaagaagtgcgttttgaaatttatcataagatgataaggaaaagagtaaacggaaaaggccacgtgccgatcctgcaaaacgcggcatcattaacggctgatgtgaaaaacggcctgctcttattagagatctcaagcgttacaggtaaaaagaatcaggcggtcattccggtttacagctctttaaaaggtgattaaatgtacaaatctgacggttttatctatcccgcggttctgtttgtttctgccgcagttttacttgtcatcagctatacttcatctgatttcatcacccgaaaaacatttgcgaaagaggccggggagtactggatcggagagaatctgctccaaaacggcgcgctgctgtcaagccgccatatgacacagggacaaaaggtccaaactggtacacagcgttttccgtacggaactgtttccttccgcatcaccgggagtaatcgccgggaaacggttcaggttacaattcaggccgaaacagtgtcaggcacgagacgggaggctcaccttttgttcgatcagaagaagaaacagctgattcaatggacggaagtataaaaaagaggcggcgggacaacacttcatagtaaagacagcactatgaggtgagagccgtgaaaacaaatgattatgtaaaatatatgactgagcaattcgttaaatatttcgatacgccgaaacaggaacggagagagcgaaaagaagtgcggaaagaaaagaaagtgccggcttctcagcactggttcggaatattgccgtacagttttaagctgtggatgcagcggaaaaaataaagcgaatcacacataaggtcctcctgtatcaggagggccttattggtattcctcaatgacggcaattttatttaccttttggctgtagggattaaaagaaatcgtaacaaacacaccaaattcttttgcgccatcccgcaatgtcaagtggtattgtttgactgcttcgtccgttcttttccggtcccacaccttttgaataaataacgtttgggcgagcggatatctttttttagcttctttttctgctaacttttcccattttgatttatggtgaacagcataataaggcaccgtttccgcctgagctgttcctgaaaccccgaaaacaagaagagaaaggcaaatcagactttgtgtgatcatcattcttcgtcctttcgctgtatatactttccattttgtgctaggcacctcgttattttctcacgttttattagaaaaaattccaaaaaggtgtgtaatttgaagcaaaacgatgtttttgaaagataccattctcaaaaacgaacaaattgaccgattttgacatttttcaagacgataatccttgattatactttgttcatgaagttctttaaagagaacggttgtcatatttattaacagttttacagggggtaaggcatgttccgattgttgcgaatggaaaaaaagggcaaggtgagatggcggatgatgctatttttacggctttcgttcattttttgcctgtccgtgacgatatgtgctcagttcacaggtgatacaagttcctccttcaatgatgtgaaaagcttcagtctcccggttcaaacgtgcggagattttcaatatacggatgacgattgccgttatgacgaacgctgggatcagagtgatttacatataacaaatcaaactgatacgtcaggcaccgtgtgtgcgccgcttcaactctatgccgagctggagaataagggaaaagagcggactgtttctgactggaaatgggagctccataaaatcacttctcagcagcagcctttacgaaacggcaatgttgtggataaagggcttattactgataaaaaaagcaaaacgatttataaaattgagtcaaagcggtctttgcagccgggcatatacgcattcaagatttacaagcctgaagggtatccggcggacgaagaacaatttgagtggtcaaaaccgatgaaactcgtcaaatgccgggaacaggcaaccgtttccgatctgaagaaaacggagaaagagccggctgagccggtaaaagaaagcggggaagaacatgaaaaaaacgctgaaactgatcagtaatattttgtatgccgtcatcttcagcctgattattgtgctgacgttaacggtgatttcgacccgggcttccgggggtgagccggccatcttcggctatacgctgaaatccgtgctgtcgggttcaatggacccggaatttaagacgggttcgctcatagcggtaaagaaaatttctgacgtaaatgacttaaaaaaaggggatgtgatcacctttacgcaagatgacggaacagccgtcacacacagaataatcgggatcacaaaaaaggacgggaacctgctgtttgagacaaaaggggaccataatgccgccccggatgccgcccccgttcaagctgaaaaagtggcggcccagtatacgggatatcagcttccgtatgcgggatatgtcatacatttggcaagccagccgatcggaacggcgattctgttaatcgttcccggcgtcatgcttttgatttactcaataacagtcatcgtcagcgccctccgcgatattgagcggaaaacgaaagcgctggaagaacatgcgaaaaagagaaccatctccacatgaatacggttgcaacctggcgacaggatttgataacaaaaaataaaaagtaaggggagtacaaacatgggtatgaaaaagaaattaagcttgggcgttgcctctgccgcactcggtttagcattagtaggaggaggcacatgggccgcatttaatgatgtgaagtcgacggacgctacatttgcgtcaggaacacttgatttatcggctaaagaacaatcagccaatgtcaatttgtcaaacttaaaaccaggtgataaattgacgaaagattttgaattcagaaacaacggttcacttgccattaaagaagtgctgatggctttgaattttactgactttaaaggagcaaagaaaggcaatgaatctgcggaggatttcctcagccagtttgaaattacggttctgacagtcggtaaagaagggggcaacggctatcctaaaaatatcattttaaaggcggccagcctgaaagacttatacttaatgtcaacaaagcaggataaagcagctgccgaagcgatcagcaagcacattgatccgaaattcctgagcgagagcggaaaagtcaatgtggcaaccattaacggcaaaacagctcctgagtacgacggagttccgaaaacgcctgctgattatgaccaggtgagaatggaaatccaatttaaaaatgacaccgcaaaaactgcggacggattaagtgtgcaaaacaagttccaaggcaatgcgatttctcttcaattctcttttgaagccacgcaatggaacggcttgaccattaagaaagatcatacggataaagacggttacgtcaaagaaaatgaaaaggctcacagtgaggataaaaactaatccgaaagtcggacagttaaaagaggagttgtgcacatatggcggcactactcctctttttgcgcttttctccatttttgataatctaaaaattcacgaaattgtttttttgataccccggatgtcatcgcatcgcgaactaatttctcccattcactatctaattgaccatcgtattcggtttcatgtttttcatcaagtaaagtatgaaccgagacgtccagaacagcggagactttttcgagaaattgaatggaggggttcgtctgtaaatttcgttctattgagcttaaataagacttcgctaccccagctttttcagctagttctgatagtgagtagcctttttcttttcggtattgtttaatacgctggccaatcaatgtcatcaccttccttgtgatattatagcacattcagaaaggatttacggtatgacttctggctgcctggatatgttgagaagactttttatgcgaaagcaggtatttgcgtatttcttctaggctgatatttgctttttgggcttctaatatcagctcaacccattccttatctaattgcgaaaattccatttttgcatttttcatgcattttctcctcctaaaatacttgtttatgtatttcagccaatccgcccatgaccttatctttacatgtctggaagtgattcatcgcatgcgaaacgccagaaattttttctatatacttttattataatatagaatttccagaaaaaacgggaaaggtgtcgaatggataacgcttatccagaaaaattactttgcaggaaaaataaaccgccgttttcaatctgaatgtgaattttcggctgatataaggctttcagcgcttgtttttccaaatggtattcctcaggtttttcttctgtctgctcataaaactgatcgagcagcctgaggtcctttttccatctggcgatcgcgctgtcagcccagtctgacggctctttggcggcagcgtcttttaagtaatgctccatccttttaatcccgctttccggcttaatcatcggcgatatggtaaagcaatagtctgatatttgcgaggtcagcggaagcggtgcaagcttctgctgaaacccttctataattgttccagaaacaagatgcaggcctaaagacaaaagtctgtcttttttcatgtcggattggtatgaaatcactacatttaatccaagccagggctgaagcggcactctggctccggctgatacaattttctcatatattcttgtaaatctcccattttgtttaactgcttgaaagatttgaaagaggcgcggggctccaaagtaaataaactcgccgtccatatcctccggagccgtttctttatcagtgatgaacgtaatcttcatcgggttcggttcgccgcccgttttttcacgccaatgccaataaaacgggcggttcataatttgtttgtccatctcgaccgtcaactgaaccgtcataaaacccggcccgtgttctgtaatcgggcagtggttcgcttcaaaaaagcgcagtaaaaattggtgaacctcctgctgtctcatgtcgcgcttcctcctttttaagagcctttttttctggcgggcttttccgtaccgtacgacagaaaagaggtgagattgtccattttgattctcatttcctcctctgtcagcgaatggcataaaatatcatgcaaatggtcttcaaaattgctcactttgatttttgttaaaatgtcatctaattctccgacgacattttcaaataaatgaattttgtcatacagaagttttaagatatgctcttccaccgtatgttttgtcgccatattgtagatatggacatctctttcctgaccgagtctgtgaatccttccgattctttgttcaagccgcatcgggttccacgggaggtcataattgataatatggttgcagaattgcaggttgatcccttcgcctccggcttctgtagcgatcagcacctgcactttgccgcggaaaagatccttcatccagtctttttttccgcgtttaaatccgcctctgaacggaacggagcttatgccgttctgctgaaggaaccattgcaggtaaatctgtgtcgccctgtattcagtaaaaataatgactttatcattaatcttttggatcaagtcaacaacttgaatcgcttttgagttttgcgtgacttgattgatgcggtccattaaattagcgatcgtctgttcatcgaatgcgggcgcttgtttgtctttttggtcaagcatttttttgagcgtcatatacacggcttccctgcttgaacagcactctctttgcagcgtcataatggaaaatgcgcttgcgggcttttccgtgccgtttttcagtgcggcaatgtcatcgtaaagcgcctgttccgtcggtgaaaaggtgatcggcactgtttccacgtggcgcttcgtccatgtaaggccggtgtcgctccgcgtgttgcggatcatcaccttattgacgagttctttcaaatgctcatgagcgtcaatcccgtccttctgattgaaggtttcttgaaatccgctttcatttcctaaatggccgggctttaacagtgacactaaattgaagatttcttcgatccggttttgaatcggcgtcgccgtcagaagcaggcagtatttcttcacaagacttctcgcaaattcataatttttcgttttgctgtttttgagcttgtgcgcctcgtcaataatgacgagatcatacggaatagaaaggacaatgtctttgtgaggggagcgtttggccgtatcaatagaagaaacgacgatatcgcactgttcccacacatagcttttcttctgttcaacagcgggtattaaaaacttctcctgaagctctttcacccactgggaaacgagtgatgccggcacaagaatcaggatttttttggccagcccgcgaatcatatattcttttaaaatcaggcccgcttccaccgtttttccgagccccacttcatcagccaaaatcgccttgccgttcattttttcaacgactttctgcgcgacctcaagctgatggggaagcggagtgaaatcgggcaggtataaaggagctctcaacccttcaaattcaggaatggcaagggtctgctggacttcagccgacagtttgtacagctcccaatttgaccagggaccgtccgttttcagccgctcagaaaactctcccggccagtttgcatcaaatatgatctctgctgtcatatgtaacaaaaccgcctttcttttaaaaaactgatttatcataatttttgttgccggacgtaaatgagggtggtaggatataagtaatgatttcactaaaagatattgctttagtatgtccataaaattggtaaatatgagcgaatgacagcaaggggagagactcggacgaaagatgggcgtccgggcgccgaaggagcaaactgcggagtgaatctctcaggcaaaagaactcttgctcgacgcaactctggagagtgtctgcacttagaagaagcaggccaccaaaggggacgtctttatgatatgttcataaagtaaactttcaggtgccgggacagagaaaccttcattttcatgaggtgtttctctgtccttttttatatgtttttacaagcgccaatgactgaagggggaagatgatgctgaaacgaacaccgctttatgatgtgtataaagaatacggcggaaaaacgattgattttggaggatgggagctgccggttcaattttcttctattaaagaggagcatgaagccgtccgcacaaaagcgggcctgtttgatgtgtctcatatgggggaagttgaagtatccggtaaagacgccctgtcttttctgcaaaaaatgatgacaaatgacgttgccgatttaaagccgggaaacgcgctttataccgccatgtgctatcctgacggcggtacggtcgatgatttgctgatctatcagaaaagcgagagctgctatctgctcgtgataaacgcgtctaatattgaaaaagacatcgcctggctgacagaacatgcggaaggagatgtcacgctgacgaatcagtctgacgggatttcactgcttgccgttcaggggccgaatgctcagtcggttcttgcgaagctgactgaatgtgatctgtcctccttaaagccgtttgcatttattgacgaggcggacgttgccggacgccaagtcctgctttcaagaacaggctataccggtgaagacgggtttgagttatattgccgcaatgaagatgcggttcatctatttaaggagatacttgcagcgggagagcatgaaggcctcgttccgtgcggcctcggcgcccgtgatacgctgagatttgaagcgaagcttgctttatacggtcaggaattgacgaaagatattacaccgattgaagccggaatcggatttgccgtgaaacacaagaaagattccgattttttcgggaaatctgtattgcgtgaacagaaagaaaaaggagccccgcgaaagctggtcggacttgagatgattgaaaaagggattccgagacacgggtacgccgtgaaaaaagacggtgttccgatcggggaagtcacgacaggcacgcaatctccgactttaaagaaaaatatcggccttgccttaatcaaaacggaattcagtgaagtcggaacggaagtagaagtggaaatccgtaaaaaaacggtaaaagcgaagatagtccgcacaccgttttataaacgtccaaaacagagctgaaaaaggagagtcatatgaagcatcgatatttgcccgcgacagaacaggataaaaaagaaatgctgaaagccatcggcgcagaaacaattgatgaactgtttgccgatattccggaagatgtgaggtttcaaaaagactaccaaattaaaaaagcaaaatctgaaacggagctgacgagagagctgacaaagcttgcggcgaaaaataaggacgctgttacatatgcgtcttttctgggcgcaggagtgtacgatcactaccagccggtcatcgtcgatcatgtgatatcccgatcagagttttacacggcatatacgccttatcagcctgaaatttcacaaggggagctgcaggcgatttttgaatttcaaacgatgatctgtgaattaacgggaatggatatcgcaaactcctctatgtacgacgggggaacggcgcttgcggaagcggcgatgcttgcgtcgggacatacgaaaaagaaaaaaatcattatttccgcagccgttcatccggaatcacgggatgttttgaaaacatacgcaaagggccaatatattgaggttgtagaggtgcccgcgaaaaacggcgtcacagatcttgaagcattggaacatgccgtttgtgatgagacggccgccgtgatcgttcagtatccgaacttcttcggacaaatcgagccgttaaaggacattgagccgctcgcacataaaggaaacagccagctgattgtttcttcaaacccgctcgcgctcggtattttgacaccgcccggggcatacggagctgatattgtcgtcggagacgcgcagcctttcggcatacctgcggcgttcggcggcccgcactgcggctattttgcagtaacgaaaaaactgatgagaaaggtgccgggccggcttgtcggccaaacagaggatgaaaacgggcgaagaggttttgttctcacccttcaggcgcgcgagcagcatatcagaagagacaaagccacgtctaacatttgttcaaatcaggcgctgaatgctttagcggcttcagtcgcgatgacggcgctcggaaaaaacggcgtcaaagacatggcccgccaaaatatattgaaagctgattacgcgagacgccaagcggaaaaagccggcttgcacgtagcatttgacggcccgatatttaatgaatttgccgtcaggctgaatcttcccgtcaaggaagcaaaccggcggctcctgcaagacggcatcatcggcggatatgacttaggtcttgcgtatccggaactggatcagcatatgctgattgccgtcacagagctgagaacgaaagaagagatcgattcgcttattgcgggattgggggatcaacatgaataatcaagatcaggcgcttatttttgaaatgtcccgcgaagggcgtgtcggttacagccttccggagcttgatgtgccggaaacagagcttgaaagccttcttcccggtgactatatccgcgatgaagacgcaaagctgccggaagtatcagagcttgatattatgcggcattataccgctctttctaagagaaaccacggagttgattcaggcttttatccgctcggctcctgtacgatgaaatacaatccgaaattaaatgaaaaaattgcccggttcgcaggtttctccgctattcatccgcttcaggacgaggacacggttcagggggcgcttgagcttttatacgatttaagcggacacttggaggagattacgggcatggacgaggtgacgctacagcctgcggcgggcgctcacggcgaatggaccggcctgatgatgatccgcgcctaccacgaagcgcggggagacttcggacggacgaaggtgattgtccctgattcagcccacggtacgaatccggcatccgccacggtcgccggttttgaaacgattaccgttaagtcaaatgagcacgggctggttgacattgaagatttgaaaagagcggtaaacgaagaaacagcggcgctgatgctgacgaatccgaacaccctcgggttatttgaagaaaacattacggaaatggctgaaatcgtccatcaggccggcggaaagctttattatgacggagcgaatttaaatgccgttttaagtaaagcaagaccgggagatatgggatttgacgtcgttcaccttaatctgcataaaacatttaccgggccgcacggcgggggaggaccgggctcagggccagtcggagtgaaaaaagaattcattccgtatctgccgaaacccgttctcacgaaaaaagagggccgtttgacttttgactatgaccggccgcagtcgatcgggcgcgtaaaaccttattacggcaacttcggcattaatgtcagagcctacacgtatatccgttccatggggcctgacggcttaaaagctgtgaccgaaaacgcggttttaaatgcaaattatatgatgagaagactcgcgccttattatgatctcccgtttgaccgtcattgcaagcatgaatttgtgttatcgggaagaaggcagaaaaagctcggcgtaagaacgcttgatattgccaaacggcttttggatttcggctatcatccgccgactgtgtattttcctctcaatgttgaagaaagcatcatgatcgaaccgacggaaacggaatcgaaggaaacgcttgatgcgtttatagatgccatgattcaaattgcgcgggaagcggaggaatcgcctgaaatcgttcaggaggcgccgcatacaacagttgtcaaaagaatggatgaaaccaaggcggctagaaagccggttttaaaatacgaacgtacacctgacgtcagccgctgacacggtataaaaaaagagcttccgtataaaacggacagctcttttttcatgattagttttttgctttaatttttccgccccattttttaaatccgcctttcaggttgtaaatatctttgcagccgtgtttgcggagcgtctgtgccgcgcgtccgctgcggacattgttttggcagtacagataaacgggtttatcaggacggatttcacttttgcgctgtttcagctgtgacagcggaatgttgcgcgcgccgagaatatgaccgccttcaaattcattcggttcacggacgtcaatcagctgcgcttttctgtagcccgcgcggaattcctcttccgtaagtgttttcattaaacgctgctggtaaaagtacgaaacgatcatataaacgataaacgccgcaacaataattaaagcaatcatattagacaatgcaattctactcctttagcttataaaatcaaaaccctgcttcctgaaaacaaggcttaccggacgttttgggacaaatactattatagtaaagcatgaagcgattgtcatccttaatgaaacgaaatatttttcattttcaaggcagtttgttaaactggttttattaaaacgataaagaagggttcagtgtatggaaaaagaaacatggcggtttattgactcagggaatgaaagcccggcatttaacatggcgctggatgaagcgcttttatattggcacagccaaaaaaaaattcctccggtgatccgtttttacggctggaatccggcaactttgtctgtcgggtattttcaaaatattaagaaggaaattaactttgacgcagtacataaacacggcctcgggtttgtcagaagaccgacaggcggacggggtgttctgcatgataaagaattgacatacagcgtaatcgtttcagaggatcacccggaaatgccggccacggtgacagaggcgtaccgggtgatttcagaaggtattctgcagggattcagaaaccttggacttgatgcctgctttgcgattccgcgaacggagaaagaaaaagaaagcttgaaaaatccgcgctcgtccgtctgctttgatgccccttcgtggtatgagctggtcgtcgaaggacggaaagttgccggaagcgcacagacacgccaaaaaggcgtcattcttcagcacggttccatcctgcttgacattgatgaggataagctgtttgatctgtttttatatccgagcgacagagtccgtgagcgcatgcagcggaatttcaaaaacaaagcggtagccatcaacgccttaacgccgaaacgggtaacgatggatgaggccagaatcgcttttaaagccggttttgaggaagggctgaacattcatcttgagccttacacactcacgtctgaagagcttgcatttgtcaatgagctggctgagacgaaatacgcgtctgatgaatggaattataagcgctgataaggcttgacagaccggaagcatccttgttttttcatgaccgttagtgtaaacttgtaatggtttataaagttaaggtgctttttgggagggttacttatgacaacaccaagtatggaagattatattgaacagatttatatgctgatagaagaaaaaggatatgcacgggtttctgatatcgcggaagctttggcagtccaccctcctctgtaacgaaaatggttcaaaaactagataaagacgagtatttgatttatgaaaaatatcgcgggctcgtattgacgtcaaaaggcaaaaagatcggcaaacggctcgtatacagacacgaattgcttgagcagtttttaagaatcattggtgttgatgaagagaagatttacaatgatgttgaaggaatcgaacatcatctgagctggaacagcattgaccgcatcggcgacctcgttcagtattttgaagatgacgaaagccggaaaaaagaattgaaatccgtacagaaaaaaaccgaaaatcccggtgaataaagggcagcccgaaatggggcgccctttttttaatgtcttcattctttggtctatttcgcccagccgtttcttaaaataataatacaccttgagatggaagggagagggcgcgctatgcagattgacggcgtattttcgggcggggggataaaaggggtggcgcttgccggcgcttatgaagcgctggaagaaaagggctttcgctttgaaaggctcgccggaacaagcgccggcgcgattattgccgcatttatcgctgcgggctatacgagcagagaggttcattccatcatagatgaggtggacggaaggcaattgcttgatcagagatactcattcctcccgctgaaaatcctgcagtgggtgtcgatatattggcgcctcggactatacagaggcgatatgctggaaaagtggattgcggataaattaaaagcgaagggcatcatcgcgttcggcgatttgaaaaaaggctcgctccgtctcatcgcttcagatctgacgaacggaacgatgatcgtgcttcctgacgatcttccccgctacggattaaatccggagatgttcccggttgccagagccgtcagaatgagctgcagcattccttatttttttgaaccgataaaactgaagaccgaaaaaggcacctcaacggtcgttgacggcggcgtgttaagcaatttcccgatttggctgtattcaaaagaacgcaaacggccggtcatcggaatttcgctttcgcccaacgaaaaagagcgcccgaaaaaatcaatccgcaacgcttttgagctgttcggggctttgtttgaaacgatgaaagacgctcatgatgccaggcatatcgcgacaaagtacgaacagaatattatttttattccggtggaacatgtgatggcgacggagtttcatctcacaccgcaaaaaaaactagctctcattgagctaggaaaaagcagaacagagcaatttttgaagcaatggagctattaaaaaagcgctctgtttttctttttattctttttgccttctatgacggtaagctgggtctggctttttttcttaagaatcatcggcttcggtctgctgctgctcggcacgctccgcaaatggctgacccggcctctgtgtccggcgcggtgcttcgctttttgctccttcattcggagccgcgattgtctggccgcttttttgaaagcggttccgtcacggccggtgcgtcggttcaggaccgtcctcacgataaaataaataataatgcctgcgataataacggtgattgctcttgaaatcatctgcccggggttggttaccgccgcataaatgaaaccgaatgcgccaagcgctatcaatacagcaaaaaaaggttgtacacgatgattcataactgcccacctccaaaataataacggtaacggttcagattacgttgtgagacggattttcgctctgttctgaaatgtcttccagtctgagaagctcgttaaagctttctatggcaacctcgacctggtcatccgccggttcctttgtcgttaaaagctgcagccacaggccgggataaccgagcactttcaaaacggggatattccgtactctgttcgtcagctggagcacttcaaaggagatgccgagaacgaccggtataagcgcaatcctgtctaaaatccgcacccaaagcggatctgtcggaacgagtaaatagacgaacatgccgacaatgatcgtaaataaaataaagcttgaaccgcaacggtaatgaagccgtgactgtttctgaacattttctattgtaattggcaaattctgttcataacagtttatgaccttatgttcggctccatgatattgaaacactcttttaattaacggcgtcattgataaaaaataaatgtagccgagaagcagaatcagcttaaacagactttcgattccgatctgcgcggcgtctgaggaaaatacgggccttacaagctccgctaagaagaccgggacgagcgtaaaaacgaatttgctgaacaaaaacgacagaacgccgatcaccgccaggctgaaaaacatcgataagccggaacccttcttctcttcctgctccagcttggcgtcatcctgaggatcaagcccgtaacgttcgctggaaaagtttaaatgctttgtgccgttggcgctcgcctcaatgatggcgacaattccccgcaaaaaaggaatcttttttaaagccgaaagcttggcgttcggcactctcggaagcttgaaaaaatcaatgcttccgtcattcctgcggatggcggtaacataattttttctgccgccgaacattaccccttcaacgacagcctgcccgccgtatgcagggggcgttttttgtttggacattgtttatcaacctgcctgttttcttaggatttactaaccatttcctttcactctattgtacaggaaaccgcggtaaacctctagttagacagccggaaaatcaatgctttttctacatgcagtataccccgtttctttagattttactcattgaatgaaaatatggcgcagctttttatgacttttcaatttttgggcagtctatgactggaggtgccatgatgacaagcgaaaaacattcagaacaggaagaaaaaaagaagcaggatgatgatcagcagcctgtttcatttaccggcagaatttgcggtatcggatttgccggcggtgtattttggagtttgatcggctatctcgggtatgtctttcatttttcagagatcagccccaacatgattcttcagccgtttatgatcggagaatggaaaaaacaatggctgggcacgatggtcagcatcgttgtcatcggattcatttcaattgccggggcgtttatttatttcgtctgcctgaagcgttttaaaaccatgtggccggggatggtgtacggcgtcattttatggtgtgcggtttttttcttattcaatccgattttcgaagatgtgaaatccgtcactgaattgaaatcagatacaatcgtgacgacgctttgcctttacattctgtacggtttgtttgtcggctactcaatttccttcaactacaatgaacttacgtcagacaagcttgcaagggcgctcggcaacaagtgaataagtgtataatccctgtccggtatggtaaaatgttcacgagaagtgaacattttttatgctgaaaaccgggcagggatgctcccgcgttgtcaggcggcagtcaagaatcggcgaggaggagaaagggaatgaaacttgagaaattgcgaaatcttttcggtcagctggatatagacggaatgttggtgacaagctccgccaatctgcagtacatgacgggatttacgggttcgtcaggccttgcggtcatatcgaaagaacgtgcggcatttatcacggatttccgttacaccgagcaggcgaagacgcaagtgaagggttttgacattatcgagcacggcggaagcttaatccaaacggctgcggatacgattcttgagtacggcattaaaaaactcggcttcgagcaaaacagcatgacgtacggaacatatgcatcctaccaagcggtgctgcaggaagcggagatggttcccgtcgcggattccgttgaaaagttgcgcttgattaagtcaagtgaagagattaagatattagaggaagctgcgaagattgcggatgatgcgtttgaacatattctgacgtttatcaaaccgggcatctcagagatttcagttgcaaacgagcttgaattttatatgagacgtcaaggagcagacggctcttcctttgatatgatcgtcgcctcgggagtcagatccagccttccccacggagtggcaagcggcaaattgattgaaaagggagacttggtcacgctcgatttcggcgcttattataaaggctattgttctgatatcacacgcaccgtcgcggtcggagagccaagtgataaactgaaagagatttatcaggtcgtatacgatgcccaagcgcttggtgtcctgcatattaaacccggcatgacgggaaaagaagcggatgccctgacgagggatcatatcaccgcaaaaggctacggacagtatttcggccattcgacaggacacgggttcggaatggaagtccatgaatcaccggggctgtctttcaggtcatcggccgttcttgagccgggcatggcggtaacggttgagccgggcatatacataccggaagtcgggggcgcaagaatcgaagatgatatcatcatcactgaggacggcaaccggacaattacgcattcccctaaagaattaattattttgtgatcggagtataggaggacatcaaacatgatttcagttaacgattttcgtacaggactaacgattgaagtagacggcggcatttggcgcgtcgttgactttcagcacgtaaaaccgggaaaaggagcggcatttgtccgttctaaattgcgtaacctgcgcacgggcgctattcaggagaaaacattccgtgcaggtgaaaaagtcgcgaaagctcaaatcgaaacaaaaacgatgcagtatctttatgccaacggcgatcagcacgtgttcatggatacaagctcatatgaacagcttgaattgaacgaaaaccaaatcgaagaagaattgaaataccttctggaaaatatgtctgtgcatatcatgatgtatcagtctgaaacgctcggtattgaactgccgaacacagttgaactgaaagttgttgaaacagagccgggaattaaaggcgacacggcgtcaggcggcacgaaacctgccaaaacggaaacaggccttgtcgtaaacgtaccgttcttcgtgaacgaaggcgatacgctggttgtaaatacatcagacggttcttacgtgtcaagagcgtagttaaagaaattcggagtctgctccttttacggggcaggcttttttttgcgttctgcctcagaatctttcttctatatgaaaatagtgagactacttccgtgagctagagcatatagtgtaacaaaatgcttgaagttgggggattgcaatgaaatttttgttcggttcaatcaattctactgttttaacgatggccggtttacgagttttgtcctcgctcattgaattatctgccgctattatcatgcttttgacaaacgacatcagaaaagcggttgtggtgaatagtattttggcaatcgtcggccctctgatctttatcatcacaatgacgatcggcatttatcagattgccggacagctctcatatgcaaaattaatattgatttttgcgggtgtggtgctgattttggccggtgtgcataaatagagggccggggtgtcataaagtctgtcccggatcatacattttaaagaagccaatcggtaaaaaggaggggactctattgaatgaaattacagaggttctccctgaattattgagagatgccatctccgccgtgcccgaagaagcgaggcgggatacagaagaaatcagaatccgggtcgacaggccggttgaactgatccaaaaaggacaacctttgtatttgtcatatgtgtgtacggccggcgacgcacagctgatcctcagccggctcagcaactatagtatgtacacgctggaagaagagctgaaaaaaggatacatcacaatcagaggaggccaccgtgtggggctggccggaagagtcatcgtcgaaaacggagccgtcaaaggactccgggatattacttcttttaatatccgaatcgcccgggagaagctggggatcgcagaaccgctcattcctttcttatggaaagaaaactggctgaacacgctgatcatcggtcctccgcaaacggggaaaacgaccttgcttcgtgatttggcccggctttccagcaccggatcaaaacgcattccggcaaaaaagacaggtatcgtagatgaacggtcggaaattgccggctgcctgcggggcattccccagcacagtttcggccgcagagtcgatgtccttgatgcctgtccgaaggcggaagggctgatgatgatgatccgttctatgagtcctgatgtcataattgtggatgaaatcgggagaatggaagactcacaagcgctgctggaggcgctccatgcgggcgtatccgttatcgtctctgcgcacggatggaatatgaaagacttggtcaagaggccgtcgctgaaaatgctttgggaggaaaacgtgtttgaccggtatgttgaactgtcaagacgccgcggtccgggaacgatcagcaggatgtacggaaaggacgggaaacctgttccgcatgctgaaagcgtgatgacatgctgaagcttttgggtgccgtgttcattctgacagcgacgacatggacgggatttgagatcgccaaaatgtatattgaaaggccgagacagatccgtcagctgcgcgcggcgctgcaatcgcttgaagcggaaatcatgttcgggcatacgccgctgcacatagcttcgggacaaatcgccgcacagctttccaagcctgtatcgtcattgtttcaagctttcagcaggaggcttgagcagggaagcgattccgccaaaacggcctgggaacagagcttgaaacataactggccctccatggcgatgaaaaaaagcgaatacgatgtgctgaagcaattcggagagacgctcgggctccatgaccgtgtttctcagcagaaacatatcaagcttgcgcttacacatttggaagcggcggaagcggatgccggacgggcgcaggcgaaaaatgaaaaaatggtgaaaagcttaggatttttagccggactgttactcattcttctattgatgtaaacatgaggggagcaaacataaaatgggagtcgacgtaaatgtcatttttcaaatcgccggagtcggtatcgtggttgcgtttctgcacaccatacttgaccaaatgggaaaaaaagaatacgcccaatgggtgacgctgcttggctttatctatattttatttatggtggcgacgattgtcgatgacctgttcaaaaagatcaaagctgtgtttctattccaaggatagggggcttacagattgagattgttcaaattgtaggtttaggcctgatcgccacatttctctccctgatcgtaaaagaacagaaaccgactttcgcgtttatgattgtcgtcttcagcggctgcgtgatctttctctatctcatcgatcagatttacgacattatcagaatgatagaaaaaatagccgtcaatgcaaatgtcaatatggtctatgtggaaaccattttaaaaattatcggcatcgcctacatcgctgaattcggtgcgcagctgacaaaggatgcgggccagggagcgattgcttcgaaaatagagctggccggaaaaattttgatactggtaatggccgtgccgatactcaccgtcattattgaaacgattctcggacttattccttcttgatcatcaataaaatggaaaggggggcacaaaaaatgaagcgctttcggtgggcgggggcttttttgttcatcctcttattttttcagactgaatgtgtacaagctgccggaacagacggtgcgtcgcaggaaaccgcagttcaccaagaatccgctgatgaagtggcgaaaaagcaggccgaagcgctgaaaacagaaggcatcggaaagttttgggacgacatcatgacagaatacggcggtcttctgcctgaaagccaaaagggaagcatcatcgactttattaacggtgaaaaaacgttctcgccggaggcatggctgaaggctttattttcatacttgtttcatgaagtgctcgcaaacggaaagcttctgggaactttgattcttctcaccattttttgtgtcattctgcagcttttgcaaaatgcgtttcagcagagcactgtcagcaaagtggcttatgcaatcgtctacatggtgctgattattctcgctttaaacagctttcatgttgccgtcaattatgccagtgaagcgatccagacgatgacaagtttcattctcgcgctcatcccgcttttactcgcgcttttggcgtcttccgggggagccgtctccgcagctttttttcaccccgttattttatttctgatgaatacgagcggccttctcattcaaaacattgtcatgccgcttattttcctgtcagcgattttaagcatcgtcagcacgatgacggatcaatataaagtcacgcagcttgccaatctgctcagaaatatcgcgatcggcgcgcttgccgtatttctcaccgtgtttctcggcgtcatctccgtacagggggcttcggctgccgtgacggacgggattacgctcaggactgcaaaatttatcacaggcaattttattcccgtgctcggccggatgtttacggatgcgacggatacggtcatcagcgcatcgctcctattaaaaaacaccgtgggaatcctaggagtcggaattttgatctgcatctccgcgtttccggcgatcaaagtgctctcgctcgcttttatttataagctcgcggccgctattctgcagccgctcggaggcgggcccgtcattacgtgcctcggcgtcatcagccgaagcgtgctgtatattttcgcggcgctcgccatcgtctctctcatgtttttcctcagtattacagtcattattacagcaggcaacctcaccatgatgatgaaataaaggaggcccattggatatgagctttttaacagaatggctgacaagcattattttgtttatcttattcgccatcgtcatcgacatgctgctgcccagctccagtatgcaaaaatacgccaagatggttgtcagcctgctgttaatcattgtcatgctcaacccgatcttcaaacttttcaaaacagacccggaaatcatcttcgattatttgacaaaacaagagcaatctcaatccgctgatataaaaaatcaaatcaaatcagaaaaaaaagaaatacaagcatcaaaccgcgcatatgttttagaagaaatggctgtccaactaaaaaagaaagcggaggagatgttcagtcatgacgaatacaaaatagacgacatccgccttacagcggaagaacaggttcgttcagaagaagatgtaaaaacgatcagcgtgtatatggccccatcttctgaaaaaaccgtgcaaaccgtcgcaccgatcgacatccgcacagaccgcaaatacgaaccggaaggcgcagccgaaaaaaaagaggccgcagacatcaaagaaaaacttgcggatatatgggaaatcggcagtgagaaaattacggtttatatggaaggcggggagaaaaacggccatgaataaaaacggactatggaccatactcaaaaaacagctgatgatcggacaggcgaaagacggagaaaaaccaaaactgacaaaatatcattactttctgttcgtgtttgtgctcggagtatcttttatgctggtgagccagctgttctcttcaccggagaaaaccgggaaggaccaagcggcgcagaccgtcatgtccggccgaacggaagacaaaagcgggcaaaaaagcgcacccgtttttaaggcatcgaaagacagcagcgccaaaaacacgatcgatgattatgaaagagactatgaaaaccagctgaaagaaatccttgaaacgattatcggcgtggaggatgtatcaattgtcgtgaacgtagacgcaacatctttgaaagtgtttgagaaaaataaaacgaaaaaagacaccaccaccgaagaaaccgataaagaaggcggcaaaagaagcgtaaccgatcaaacctctgaagaacaaattgtcatgattcgaaacggggatcaggaaaccccggtcgtcgtccagacgaaaaagcccgatatccgcggtgtactcgttgtcgctcagggagtggacaacgttcaaataaaaaaaaccatcattgatgccgtcacaagggtgcttgatgttccgagctaccgtgtagcggttgcccctaaaaaaatcaaggaggattcataaatcatgctgaaaaaacaaacggtttggcttttaacaatgctcagtctcgtcgtggtattaagtgtttattatattatgtcgccggaaagcaaaaatgccgtgcagatgaaaagcgaaaaaagcagcggagaagtggcaactgaaaaaacgccggctcctgaaacgaaagataagaacggaagcggcacggataaagaagacggaacaaaaggaacgaaagattctaaaggcgcaaaagaggataaagaaacatcagccgaagcatcggacaaagacggatcggtcgctacagaaacagctgatgaaaacttatttaccgcataccgcatggaacttgaagacgcaagaagcaaagaaagggaacagttaaacagcattgtttcaagcgatgatgcgaccgcaaaggaaaaaagcgaagcctacgataaaatgacggcgctgagcaatgctgaagggacggaaaaacagctggaaacgctgattaaaacacaaggctacaaagatgcgctcgtggatgctgaaggagacaaaatcaacattacggtcatgtctgacaaacattcaaacgcaaaagcttccgctatcattgacctggtggaaaaagaaatcaagacgatgaaagacgtcgccgtcacgtttgaaccgacaaaataagagatctccaccgcccgcacccgctgcgggcttttctgatgtcattttagatcagtgttgaatttacacaagcgctcctgtaagataaacatagtatgtacttttagtagcaacccataaatttctattttttatacataggagtggaaactgatgttaaaaatcaacgaaattcatgaactgataaaaagaatcgatgaatcttccatcgacgaattcgtttacgaaatcgaaggcgtaagcctcaaactgaaaaaaaatgaagcgccggcagtgaatgtaacgggacaagctcaagccgttcccgccgcttacgcacctgctccgcaggctgcaaaaccggaagcgcatgaagccgctcctgttcaggaagcgccgaaacaagacgaaaacctgcacaaaattacgtctccgatggtcggaacgttttatgcttcttcatcgccggaagccggcccttacgtaaaccaaggttcaaaagtgagcgaaaatacagttgtttgtatcgtagaagcaatgaaactctttaacgagattgaagccgaagtaaaaggagaaatcgttgaagtgttagttgaaaacggccagctggtcgaatacggacaacctctatttcttgtaaaagctgagtaaggagacctgctattatgattaaaaagctattgatcgccaaccgaggagaaatcgccgtcagaatcatccgggcctgcaaagagctgggcattgaaactgtagccgtttattctgaggcagataaagacgccctgcatgtccaaatggccgatgaggctttttgtatcgggccgaaaacatcaaaagaaagctatttaaatgtaacgaacatcgtcagcgtcgcaaagctgaccggcacggatgcgattcatccgggatacgggtttttagctgaaaacgccgactttgccgagctgtgcgaggaattgaacgtaacgtttgtcggccctacggctgacgccatttcaaaaatgggaacaaaagatatcgcgcgcgacacgatgcagctggctggtgtgccgattgtgcccggttcaaaaggaatcataaaaaataccgaagaagcggtttcgcttgcaggtgaaattgggtatcctgtgattataaaagccactgcgggcggaggcggaaaaggcatccgggtcgcacgcacagaagaagaactgatcaaaggcattgagattacccagcaggaagccgctacggcattcggaaatccgggtgtgtacatcgagaagtacatagaagatttccgccatgttgaaattcaggtgcttgcggataattacggaaacacgatccatctcggagagcgtgactgttctatccaaagacgtctgcaaaaacttcttgaagagtcaccgtcacctgcgcttgattctgaaatcagggagcagatgggcgaagctgcggtaaaagcagcgaaggccgtcggttacacgggagccggcacagtagaattcatttatgactacagagaacagcgctactacttcatggaaatgaacacgcgtattcaagtagagcaccctgtcacagaaatggtgacgggaacggatctgatcaaagaacagatcaaagtggcatccggacaggagctttcgctcagacaggaagacgttgaatttaacggctgggcgattgaatgccgcatcaatgctgaaaatcctgcgaaaaacttcatgccttcacccggtaaaattaacatgtacctgccgccgggcggactcggcgtacgcgtggattcagccgcatatcccggctattcgatcccgccgtactatgacagtatgattgctaaagtcatcacatacggaacaacgcgtgatgaggcagtcgcacggatgaaacgcgcgctgagcgaattcgtgattgaaggtattgaaacgacgattccgttccatctgaaactgcttgaacacgaaacatttgtcagcggagagtttaatacaaagtttttagaaacatatgatgtaatgggctcataatttttgcgggaggtgaattgaatggaagacaacagtgtgcttaaaatggatcatgacgaggctcatttaggcaaggttgaaattgctcctgaggtcattgaagtcattgccggcatcgccgcttccgaagttgaaggagttgctgaaatgcgcggcaatttcgccaccggcgtcgtagaacgcttcggcaaaatcaatcacggtaaaggcgtaaaggtcgatttagccgatgacgggattaccatcgacgtctattgcgtcgttcaattcgggatctcgatcccgaaagtggcggcaagcgttcaggagaatatccgccaaaccttattaaacatgacgtctctgaccattaatgaaatcaatattcatatcgtcggcattcaatttgacacgaaagcccaagaagtcgaaatcgacgaagaaatgtaatgagcgtataaaaaccaaggggatgggcagccctttggttttttatacgtttcccgtcatttcaggcatgaagaaagccggcttacaaacggcagccgagtttcttcatgctgtgaaatccgaatgaaattaatacggtttgtgaaaatattcggcattagggtgaaaaaacctaaatttcgacatgcgattgagaaaaaaatatgttatgatctctttaagcttaacgacaagcggataaagcggatctgaaggagaaagaaaatgaaaagaagaacagctagagaaaaagctttgcaggcactttttcagattgatgtcagcgatattgcaccgaacgaggccattgagcacgcgcttgatggtgaaaaaacagatgccttctttgaacagctggtgtacggagtgatcgaacatcaggttcagcttgatgaaatgatttccggccatctcgtcaattggaagcttgaccggattgcaaacgtagaccgcgcgatcctgcgtctggcggtgtatgaaatggtttatactgacgacattcctgctaacgtgtcattaaacgaagcaatcgagctggcaaaacggttcggcgacgataaagctgcaaaattcgtaaacggggttctttctaacattaaaactgatatcgaatcataggaggaaagaaaatgactgcaacaatcatcgacggaaaagaaacggctaaagaaaaacgcgaacaattggcaaaagaagtagaagagctgaaagcacaaggcgtagtgcccggtttggcggtcattttaatcggagacgatcccgcttctgtttcatatgtgacaggcaagaaaaaagccgctgaaacaatgggaatgaaatttaaacttgaccgctttgactcaagcttaaccgaggcggagcttttaacagtgattgatcagtataatcaaaatccggaattccacggcattctcgtccagctgccgcttccggatcatatttctgaaaaagccgtaatcgagcggatctctcccgataaggatgttgacggtttccaccctctcaacgtcgggaaaatgctgcttggcgaagatacatttctaccatgcacgccgcacggaattgtcgagttattgaaaaagacgaacgtagatctttccggcaaagaagttgttgtagtcggacgaagcaatattgtcggtaaaccggtcggccagctgctgctgaacgaaaacgcgaccgtcacatattgccattcccgtacgaaaaatatgtctgagcatacgaaaaaagcagatattcttgtggtagcggtcggtaaagcgaatttcatcaaagccgatcaaatcaaagagggcgccattgtcattgatgtcggcgtcaaccgtctcgaaagcggaaaactctgcggagacgttcagtttgatgaagcgaaagaaaaagcatctttcattacgccggtgccgggcggagtaggtccgatgaccatcacaatgcttgcgcataatactgttaaatctgccagacgtacgttatcatagataaccggagacagtcacaaaaagtgtgacaatgagcacgatacccgcttcttaaggctcctttcagccagagcgggttttcttagtttagggcaaaaagcctttatgaaaggagtgcaggatgtgagtgaagcggcatatgtcacggtttccgcgctgaccaaatacattaaacgaaaattcgatgtggaccctcatcttgaagacatttggattaagggtgagctctccaatgttaaaattcatacgagaggccacatctattttacattaaaagatgagcatgcccgcatgcaggccgtcatgtttcaaagacaaagttcgaggcttgcgtttaagcccgaggacggaatgaaggtcatcgtaagaggcggcatttccgtctatgaaccgagcggaagctatcagctgtacgcgaaagaaatgcagccggacggtgtgggggcgctctacttagcatatgaagaattaaagaaaaaacttgccggcgaagggttgtttgatgaccggcataagcaggccatccccgcttttccggctacgatcggggtcgtcacgtcaccgacgggagcagccgtcagagacgtcattaccacactcaaaagaagatacccccttgtgaaagtcattgtgcttcccgcgctggttcaaggtgaaaatgccagcagatcgattgtgaagcgcattgaagaagccaatgcacaaaaaatgtgtgacgtcctgatcgtcggaaggggagggggctcgatcgaagaattgtgggcatttaacgaagaaagcgtagcccgggcgatttttgcttccgccattccgattatatcagccgtcggacatgaaacggattttacaatcagtgatttcgtcgcggatatccgggcggcaacgccgacaggagcggcagaaattgccgtccccatacgacggacttaatggaacggacaaaaacggcggaagtccggctgacaagagcgatgcagcagcatatcagcaagaaaaaagaacgggttctatcgctccagtcatcctacgcgttccgttttccgaaacgattgtatacccaaaaggaacagcagtttgatcttttgtatcagcagttccaatcacagctcacagggcttacggacaggaaacaaaggcagctggagcggaatacgtacagattaacggcgctccaccctgaaacccagctgaaacaggcgaaaaaacggtacgaggagcgctcaaatcagctcgcccgaagcatgaatgtccagctgaagcagcttcattcgcagtttcagacggttcttggtaaactgaatgcattaagtccccttcaggtgatggagagaggatacagtctggcctataaagataaagagctgatcaaaagcgttgatcaagtggaacaaaatgatacgcttgaagtaaagatgacagacggcgttctgacgtgtgaagtattgcaaaagagaggcgaacgaaaatgacagaaaccaaaaaaagtgaagagctgacatttgaagaggcgatgaaaggccttgaaggcattgtggcaaagcttgaagaaggagacgtgccgcttgagcaggcgattaattattttcaggaagggatggccctttcaaaaatgtgccatgaaaagcttcagcatgtcgaaaagcaaatggactttattttaaaagataacggcgaacttgcacctttcagcgttcaggaggaagacgaaggtgacaaataaactggacgcatttttagcatcgcgcaaaaaactgattgaacagcagctttctttgtatacggaacggcttgcgatgcctgaaatcctcaaaaaatctatgctgtattctttggaagcgggcggaaagaggctgcgccccctcgtcgtcttagccgttctgaatgcttacggaaaagatgaaaaagacgggattccggtcggatgcgctgtcgaaatgattcatacgtattccttaatccatgatgatcttccttgcatggacgatgatgatctgcgccggggaaagcccacaaaccataaagtcttcggagaagcggcagccgtattggccggagacgggcttctgacagaaagctttaaattgatcacatcccacgtgtctgaggcggtttcagcagaaaaacggctccgtctcgtcgatgagctgatcagcgcggcaggaacggaaggaatggtcggcgggcaggctgccgacatggaagcggaacaaaagcggataacgcttgaggagctggaatccatccacgagcggaaaacggccaagctcctcggtttttctgtgacggcgggcgccattttggcagatgcgccggaggatgaagtcgaaaagctgcgtctgttcagcagccatatcggcatcggatttcaaatcagagatgacatccttgatattgaagggcatgaggagaagatcggcaaaccggtcggctcagacacgtcgaatgaaaagtcaacgtatccgtcgcttttaacgcttgaaggcgcgaaagagaagctggcgtatcatatcagcgaggcgaaacggatcatcagcggcctttctcttcagaaagaactgctgcatgacctctgtgatttaatcgcggcgagagatcattaaaaacggtcctgatttgaaggggctgccgctcctatggtaaaatgtaagcagtttcgatgaaaatacaaagggagtctttttcttttttcaaaaagacactgtttaatttgcagaaattcatgctgaaagtgagttgatccgctttggatcttttatcaatacaggacccgtcatttcttaaaaagatgtcaattgaacagctggaagagctgagtgaggaaatccgcaatttcctcatcacatcgctgtctgcctctggcggccatatcgggccgaacctcggggttgtcgagctgacaattgcgcttcacaaagaatttgacagtccgaaagataaatttttatgggatgtcggacatcagtcctatgttcataaactgttaaccgggcgcggcaaggagtttgaaaccttgcgccaatataaagggctttgcggtttcccgaagcgcagcgaaagcgaacatgacgtatgggaaacaggccacagctcaacatcgctctcaggcgcgatgggaatggcagccgcccgtgatattaaaggatcgaaagaatatatcatcccgattatcggagacggcgctttaaccggaggaatggcgctcgaagcgctgaaccatatcggtgatgagaaaaaagatatgatcgtcatcctgaatgataatgagatgagcattgcgccgaatgtcggggcaattcattctatgctgggacggcttcgcacggccggcaaatatcaatgggtaaaagacgagcttgaatatttatttaagcgcatcccggccgtcggcggaaaattggccgccacagcggaacggataaaagacagcttaaaatatatgcttgtgtcaggcatgttttttgaagagctgggctttacgtatttaggccctgttgacggtcattcctaccacgaactgtttgaaaacctgcaatacgccaaaaaaacgaaaggtcctgtccttttgcatgtcattacgaaaaagggcaaaggctataaaccggctgagaccgacacaatcggcacatggcacggaacggggccttataaaatcaatacgggtgatttcgtcaagccgaaagccgcggcgccttcatggagcggacttgtcagcggcaccgtgcaggagctggcgcgcgaggatgacagaattgtcgcgattacaccggctatgccggtcggctctaagcttgaaggatttgcgaaagaatttcctgagcgcatgtttgacgtcggaatcgcagaacagcatgcggcgacaatggccgcgggaatggcgcttcagggtatgaagccgtttcttgcgatttattcgacctttttacagcgggcgtacgatcaggtcgtccatgatatctgccgtcaaaacgcgaatgtatttatcggcattgaccgcgccggtttggtcggcgctgacggggagacgcatcaaggcgtctttgacatcgcctttttgcggcatataccgaacctcgttttaatgatgccgaaggatgaaaatgaaggccgccatatggtcaatacagccctttcatacgaggaaggtccgattgcgatgcgcttcccgcgcggaaacgggctcggcgttaagatggataaagagctgaaaaccattccgatcggaacatgggaagtgctccgtcccggaaaagacgcggtcattttaacattcggtacgaccattgaaatggcgctggaagcggctgaagaactgcaaaaagaaggcctgtccgtgcgtgtcgtgaatgcgaggttcataaagccgattgataaacaaatgatgaaggccattcttaatgaaggtctgccgattttaacgatagaagaagctgtgcttgaaggcggattcggcagcacgattcttgaatacgctcatgacctcggcatgtatcatacaccgattgacagaatgggcatcccagaccggtttattgaacacggcagcgtaaccgccctgcttgaagaaatcggtctcacgaaggctgaggttatgaatcggataaaactgctgatgccgccgaagacacataaaggaattggatcatgacagcaaaaaaagaacgattagatgtacttcttgtagaaaaaggccttgcggaaacgcgggaaaaagcgaaacgcgccattatggcgggcatcgtatactcaaatgaaaaccgattggacaaaccgggtgaaaaaatcgcccgggatcttccgttaacggtaaaaggaaaccctcttaaatacgtcagcagaggcggattaaaacttgaaaaagccttggaagtgtttcctgtctcggtaaaaggcaaaacgatgattgacatcggctcgtctacaggggattcacggattgcgccctccaaaacggagctgagcggtcctacgcagtggatgtcggctataatcagcttgcttggaagctcagacaggacgagagggtcgtcgtcatggaacggacgaatttccgctattccgagccttccgatttcacagagggtttgccggaatttgcgacaatcgatgtttctttcatctcactccgcctcattctgccggttttaaaaacgctgcttgtaccggggagcgattgtatcgcactggtgaagccgcaatttgaagccggacgggaatccgtcggaaaaaaaggcattgtcagagatcccggcgttcatgctgacgttctccgccgcatgaatcaatttgccgcttctgaaggatatacagtgaaaggactgtccttctcaccgattacagggggagacggcaatattgagtttctgcttcatctggaatggggcggagaagacggaaacggcgctgaactgccggaagaagatattctccgtatcgtccgcgaagcacatgagacattaaaagccaaaaagacagatgtaccggaataatagggggctattattccttttttctgccatcatgtactttttatcaagaagcggttaacataatgacaagaacagcttgaaaacagaggtgcttacatgacaaaaggccaaaggcatataaaaatcagagagcttattacaagccatgagattgaaacgcaggatgacttagttgacatgctgagagaagaaggatataaggtaacccaggcgactgtctccagagacattaaagagctgcatctcgtaaaggtgccgacgaacaacggctcctacaaatacagcctgccggcggatcagcggttcaatccgctgtcaaaactgaagcgttcattaatggatgcgttcgtaaaaattgactcagcaagccatatgatcgtattaaaaacgatgccggggaatgctcaggcaatcggcgctctgatggataatctcgaatgggaagaaatcatgggcacgatctgcggagatgacacgatcttaatcatctgcaggacgcctgaagatacggaaggcgtacaaagccgtcttttggagctgctgtagcgtaattatcagataaaaggtggaatgctgtttgttagctgaactatcaataaaaaactttgccattatagaggaactgacgatttcgtttgaacgggggctcaccgtcctgacgggagaaacaggggccggcaagtcaattattatagacgccgtttccctattagtcggcggacgcggctcgtccgaatttgtccgttacggtgaaacaaaggccgagcttgaaggactgtttctattggacagcggtcatcccgtttttgaagtatgccgtgagcagggaatagacgcatctgacgacatgattgtcatgagaagggacatcaatgccggaggaaaaagcgtctgccgtgtcaacggaaaattagtgacgattgcggctttaagggaaatcggcagacttttattagatattcacggacagcatgataaccagctgttaatggaggacgacaaacacttggagcttttggataaatttgcgggcgctgaggccgaatccgcgcttcaggcttaccatgaaggctatgagcgttatatggagctgctcaaaaaagtgaagaagctgtcagaaagcgagcaggaaatggcgcatcggttagacctgattcaatttcagcttgaagaaatcgagtcggcgaagcttgaattgaatgaagacgaacttcttcaggaagagcggaagcagatatccaactttgaaaaaatttatgaatcattgcaaaacgcctataatgcgctccgcagcgagcaggggggcttgactgggtcggaatggcctctgcccagcttgaagatatttcggatatcaatgaaccgctgcaaaagctgtctgaaagtgtgtcaagttcctattatctgctggaggatgcaacctttcaaatgcgcaatctgttagatgatctggaatatgacccggaacggctgaattttattgaaacccgtttaaatgagatcaaacagctgaagcgcaaatacggagcgacggtagaagacattttggaatacggctctaaaatagaagaggaaatcgatcaaatcgagaaccgcgacagccaccttgaagccctgaagaaggaattggagtcggtcggcaaagatgtggccgtagaagccgccaatttatcaaaaatcagaaaagcatgggccaagaaactggcggaagcgattcatcaggaattacaaagtctgtatatgggcaaatcaacgtttgatacggaatttctcgtgaaaaccgatccgtcagccagtgaagcaccggttgttaacgggcagcccgtgcagcttacccaaaaggggatcgaccttgtgaagtttttaatttcaacaaacaccggtgagcctttaaaaccgctgtcaaaggtcgcttccggaggcgagctttcaagggtgatgctggcgatgaagagtattttttcttcccagcaggatgtcacctccatcatctttgacgaagtggacaccggtgtaagcgggcgggttgcccaagccatcgcggaaaaaatccataaagtatcgaccggttcacaggtgctctgcattacacacctgccgcaggttgccgctatggcggatacgcaccttctgatcgcaaaagaattcaaagacggacggacgacaacgcatgtcacgccgctttccaagcaggataaggtagcggaaatcggccgcatgattgcgggtgttgaagtgaccgatctgacaaaacggcatgcacaagagcttttaaaacaggccggacaggtaaaaacgacaggataagctgctgatacaggcagcttattttttgttccatttctctaacagtgtatccaatgtttttcttcgtatgccggttataaatcaagcgcaggaaggcaaaagtatagatgtagcagaaaaagaaagtggtgtgggataggagcgaggagagtgaaggaatgaatgcacgataacatgaggaaagcaataggtgtaattctccttgtttctttactaagtgtaggcttttttaagccgtttaaagaatatttactgataccgtcagaaatgagcgtctttgaaaaccagacacaggccgttccggtcaatgcatcaataagcgctgaaaagggcgaattatcagaagcctttacgctgaaagaagagcacggtcatgcaaacataacagggcaaacacaaggcaggtcagaagtagtatatgatcttgccggatttcccattaaaaaaacgaaagtgcgtgtccttcctgaattgaaggtcattccgggcggacagtccatcggtgtaaaactgcattcagtcggtgttttggtcgtcggttttcaccaggtgatgacaaaggatgggaaaaagtctccgggagaacaagcgggtattgaatctggcgacatcattattaaaatgaacggacataaaattgaaaaaatgagcgacatcgccccgtttattcaaaaagcgggcaaaaccggtgaatctctggatttattggtgaaacgcgataagcaaaaaatcaaaacaaagctgattccgacaaaggacgaagccgaggggaaatatcgaatcggcctttatatccgtgattcggcagccggcatcggcaccatgacattttttgaaccgaaaacaaaaaaatacggcgcattgggccacgtcatctctgatatggatacaaaaaaaccgattgttgtagaagacggagaaatcgtccgttctactgtaacatcgattgaaaaaggaaaaggcggcaatccaggcgaaaaactggcaaggttttcgtcagaacggaaaacgatcggcgatattaaccgcaacagcccgttcggcatttttgggacactgcatcagccgattaaaaacaacatttccgacaaagcgcttccgattgctttgtcaaatgaagtaaaaaaaggacctgcgcaaatgctgacggttatcgaaaacgataaagtagagaaatttgatattgaaatcgtcagcaccacgccgcaaaaattcccggcgacaaagggaatggtattgaaagtgacagatccgaaactgctgaaaagaaccggcggaatcgttcaggggatgagcggaagcccgatcatccagaacggaaaggtcgtcggagccgtaacccacgtatttgtcaatgatccgacaagcggctatggcgttcatatcgaatggatgctgtctgaagcgggtgttgatgtttacgggaaagacaaagcaagctgactgccggatgatccggcagtttttttatgtgatgcgttcttcacttctttccgggattcatgtaaaataagacatgaagatttttcgacaaattcacgtttcctgatttgtcaaacttaatttttagtcgaaaaacctagaaaatgctagaaaaacaaagatataccactattattggtaaatatggattttttaaaaggggaagtagtggttttgtcgaatgtaacatatagcagtcaaatgggttgcgtcctgttaatacattgggggaggaagaaacgtggagaaaattaaagtttgtgttgctgatgataatcgagagcttgtaagcctgttgagtgaatatatagagggacaggatgatatggaagtgatcggcgttgcttataacggacaggaatgtctttctttgtttaaagataagaatcccgatgtgctcgtgttagacattatcatgccgcatctggacggacttgcggttttggagcgtctgcgtgaatcagagcttgagaagcagccgaacgtcatcatgctgacggcattcggtcaggaagacgttacgaaaaaagccgtcgatttaggcgcatcctatttcatcctgaagccgtttgatatggaaaaccttgtcggccatatccgccaggtaagcggaaatgtcagcagtgtcacacaccgtgcgccgtctgcgcaaagcagcattatccgcagccagccggagccgaagcggaaaaatctcgatgccagcattacaagcattatccatgagatcggtgtgcctgcccatatcaaaggctatctttatttgcgtgaagccatttccatggtgtataacgatattgaactcctcggcagcatcacaaaagtcctttatcccgacatcgccaaaaaattcaacacgaccgcaagccgtgtagaacgggccatccgccacgccattgaagtcgcatggagcaggggaaatattgattccatttcttcactgttcggatatacggtaagcatgacaaaagcaaaaccaaccaactcagagttcatcgcgatggttgctgacaagctgagattggagcataaagcttcgtaacgcaagcctttggctaaatgtctttttgcgccttctattccgtgcatgaacgcggaagagaaggcgttttgagattttgctgacgaaaacaatgggaaccactcacgccggtacttgttctatacataaatacgggaactgccgtctatacgtataataccggagctgatattttaatgattttgccgtctctgaaataaaagcgggggatgcggcggcttaacacagaaaggacttcgtagctgatcgtaccgagcatttcggcaatttcatcaacggaaatctcggctccttgttgtttgccgtagatgacgacttcttctccttgtttgccctcattctcacctaaactgaccattatcatatccattgtcactctccccgccaccggcacccgtctgccgcggtgcagaataaacccgcggttggacagggcgcgggagtaaccgtcagcatagccgatcggaatcgtcgcgatgatttcacccggttcggcgatatatgtggcgccataactgacggtccggggatctgtcaccatagctttcacataagcgatacgcgcctttaaacttagtgcgggtgtgagatccacgaggttcagttcctttatcgaggcggacggatataaaccatataacccaatacctaaacggatcatgtcggcgctgaattccgggaatgcgatagcggcggctgtattgcacatatgcacggtaggcagcgtaatgtcttgattttttaaaaagcggagaaagctgataaacttttcgtgctgcagcatcgtcagctcagtgtccggttcatccgctgttgaaaaatgtgtaaagatgccatcccatgacaggtatgtactcgacttgagcgctttcaccactgctaaaagatcttcttctgtgcgcacacccagccggcccattccggtatccacattgatatgaatggacagccgtttcgactctgcttctttttccaatatccgattcgcttttttgatccagctgacctgaaacgctgataatgtgatgttccaaacggcagattttttcacacagctgagagctgtgaagccgagcacaagaataggcgctttaattcccgctctccgtaacacaattccctcttcgacgctggcgacagcaagctcgctcgccccgctttccagtgcctgccgcgctacttccacagagccgtggccataagcgttcgcttttacgacggccataattttagacgtattcggaatatggcggcggatcgcccgtacgttcttttttatcgcatcaaggtcaacttcaatccaaacttcccggcaaagttttttcatcacgattccttctttccttaatgagattcagtactcatgctttcaatctgcattctattcatctttaactgaaatcattcaaaacatgagaaggtgaccgctgatgtttaaaatcaagttttcgggaaagcatgcgcctgctttatttatgcagtaagggcagcatggcggcccttacaatgactttacaatattctgatctgaaaattgatgttcaaacattttggactggcttacagcattgttttgaatgacaatgccgatatttccccctccggcaccgaaaacggtttttgatgcagtcagcggactgatggatatggcgccgccaacattgacaactccgtttcctgatacgttgtttatcgtaatcgggcaaccgctcattctattttttctcctttctctcacagtctactaactatatgtacgctgtgatatggaataagattaaacaaaacggcaaaaagaatccggctgctgccagccggaaagggagggaaatacggatatcataatgttttcgttacattttgatcagagtattgagagtttgaagattgagatgtgctggattgattcatttgcaggaccatacctgtatttccccctcctgagccgtagacggtttttgatacggttaaaggacttatcgaaaacgcaccgccgacattgacaaccccgtttccggaaagactgttaatcgtaatagggaaaccagccatcatatacggtctcctttctattaatctatttactatatgtacgctgtgtgttagaaataggagtaaacaaagcggtaaaaacttgtgaatcaaaaaaactgccggacatccggcagttttttagtctacttttcaaacggcacccagccgcctgtattctgaatcatttcccataacggttcaggaagtcggtatttatcaatttcagatgcctgaatggctttttcgatttcctgttcgcggccttctttgaccagcaccgcccattcggggttaatcaaaatgacacgtcccagagccaccagcggaattccgctttctaatacggcaagcgcttcgtccgcggtatagatggaaccgacggccatcagcggcactttatggccgacgcgttcgtttaataaatccatccgggtccgtgaagtatccgcgccgcggcgggctttggaattgacatccatcagtgaaatatgcagataatccaagttctcttccgcaagcgcgtcggcgagcatgaatgtttctttcattgtaagccccggtgtttccggctcttccggtgacaggcggtagccgagaacgaatggattttcagcgtgtgtatcaatcgcctgtttgacagcgtcaacgactgcaagcgggaacgcaaggcgcttttcatcgcttccgccccagcggtctgtgcgccggtttgttttcggtgaataaaattggtgaatcaggtacccgtttgccccgtgaatttcaacaccgtcaaagccggcttcaatcgctctgcgtgtcgcttcgccgaatgctttcacgatgtgctcaatttcttgttctgtgagagcacgggacgtttgtctgccgtcttcttctgagccgctcggactgacgacgtcgttgtttggcacgagttcaggagggcattccaagcctccgtggtgaatctgcacaacggctttcgctccttgagactggatcgcctgagcgagttttttcaagccgggaatgtgagaatcatcatagatgccgggctggcctggaaacgctttgccgtccggcgttacgtttgcacatgccgtaatgaccatgcccatttcttttgaacggggagtaatgtagcttaattcacggtcggaaatcgttccgtcatcatttgatgaatagtgtgtcatcggtgcgactgaaatacggtttggtatagtgacaccgctttcgaacgtaaaaggttcaaacagcggtttataagtttgcttcatcatttcgccttcttccttaggagtttaactcgtccgtattctagcttatgttttcattgtgtgcaattattttgcttgttcttcttcctgaggttatgaccggctgaaccatttaaacgaatgaaacggttttctccgttccttttcaggatctttatatcctcctgaaatttgatggccgatcgagctgaatatgacagcggcggcgaagaggagaatgatttttttcatatgcatatcttctttcttatcttttacatggttatttataagcatacgcttgtgcgaaaaaaccgtcaatttgtttattcttttttccactttcctgcggcgaatatcgttccgatctgaatcacaacacttaacagagcgcacactgccacaactgtgttgctgtccatagaagacaccctcctttttgttaggttgatgtatcatatgacggctgtctctgttttgacaaaaccgtaatgcggtgtttcatatttttcaacacaaaaagggcgcttttttaagcgcctttacttttttttcagccggttcaaagcgatttgaacggcgatggcgtcatccaggtagccgatcggaaacatgtaatccgggataacgtcggtcgctaaaatataatacagcagcgcgctcccgagaatcgcgcggtcttcagccggtgttgattcatccatatactgatgatgcatgtttttcaaatggtcaataaaagggccgacgctttcttcattgtccattttcttttgaaactcatcgcaaatcaggcgatggccctgctgggttttggcgtattgttcatatctggtcagttcacgctcaatttgctcccgggaaaaaggctgatcaaacatctcggccatattcagcatatcctgaatcgcgtgcatcgggtcttgcggcgcagcttctttttcatggccgatgtctatgcctgacgcctcaagcaattcctccagcggggtgcggaggtgttttgaaaattcctgaagatgctttaaattggccttctgtttgccgttgataatccgggagatagtggccgtatcaatgtttgttaaggcgccgagttttctcatggagagcgagtgcttatcaagcagtgattttaaaaggggtcccagtgtcttatttttattttctgtcaagggtgtcacctcgtttccgccggaatgatgatcgtcaatcaataatttttgcagaaaaggtaccttttctgtgctgctgaataggatagtgtagattcaacggcacaacatgttgaaaagacatcaaagaatggagagaaacgaacatggcttggttattgattttaggtttggcagtgtcctcaagcattgataatttaggagtggggatgtcatacggcatcagaaaaatcaaaatatcgcatgcgtcaaatatgatgatcgcttttatctgttttgtattcagttatatcggaatttatttcggcaaatggatttcagccgttttaccgggctttcttcctgtattgctggcggcgtttattttatctgtcatcggtatccgcatcattctgctggctgtgccgagaaaaacagcgcgtgttggcgggtcaggaaaaaaaggccgttttgccggtctgctgcaaaatccggaggcagcggatgccgacggttcgggagaaatcggtatattggaatccttggttctcggggtggccgtatccgcaaatgcgctgaccaacggattaagcgcggggttgatcgggctttctcccgctgccatttccattactgcggcggtcggaagctttctgaccatatggatcggctgctcgcttggaaaaaaagccgcttcattgcgcatcggttcttttcacgtcggacagttcagcacggtgctgagcggagtgattattctcatcattgccgccaatacgctgctcttttaagttgtcccgttcattttatgaaaagctcaaaataaatatgaatgtttctattcgggagagtgcatgacgcggctctcttttttgccgatctgatattttttcaaaatgaacagaaagtcgtccgtttccgttaaattctgcatattcggccttcagacagaacctttttcatagactgatcagcttgttttctttctaagttcaggtaaacagcaggtcagatagccttcattccaaagatggaaaaacgctggaggaatggaggctccctttacaaatcggccattctgttcaaagataaagccgaatgagaaaacgtgaggtgatctgtgtgaagtctgccatacttctgatcttcaccgcatggctgttatcaggctgcgagtataccgcggaggctgatgcggcgccgtcatttacacaggaaggaacatttataaaagcggccggaaacgatacgatcgcggtcgaaattgacggagaaaggcaagaggtgaaggtgcctttcgctaagcggtttgaatgtcagtcgctgcctgaacatacggcggtgcaaatcacctataaaaaagagagcaacggacaattacggcttgagaaactgaaaaaagaaacagatatgtgaaaacggggaggaaaaaaacgtgggtttactgacaaaaagcgctgctgccttcggtgccgctctgcttctgcttgcgccgtccgcttatgcagccgaacctttgcaagggaaaaccatctatatagatgccggacatggcggagaagacagcggggccggcggaaatggactgcttgagaaaaacatcaatttagcggtgtcaaacaaggtgatcgccaaattggagacagaaggcgcaaaacctgtagcttcaaggactgatgatacttttttacgtttggacgagcgggtggcgaaagcgagcgccagccaatccgatttattcgtcagcctccataccaattcagccgtatcaacggcatcgggcgcggaaacgtattttaattcgacatatgaaggagcggacagcgaaaggcttgcttccgacattcagcagcagcttgtcacgtctttagggatgagggacagaggcgtaaaagaagctcctttttatgttattacatattcaaagatgccgagtgtgctggctgaattaggttttatcacaaatcctcaagatgcggacaagctgaaaagcgataacggacaagagcacgccgcggacgccgttgtaaacggaatcgaaacctattacagcggacggtaatgataaaatatgtgtaaatagcgccctcctgatgtgcataacgattataatagagaaaaccgatgacaaacatctgaggtgacacatatgacgaatatttttgcccaccggggggcgtcgggcgactgccctgaaaatacgatgcccgcattcaaaaaagcgattgaggacggggctgacggaatcgaacttgatgtacagatgacaaaagacggccggatcgtggtcattcacgatgaaaccctcgaccgcacgacatctttgaaaggatttgtgaaagatacggcgtatgacaaaatcagaaccgccgatgccgccggaaaatggaaagattcttttaaaggtgtcagaattccgcttttgtccgatgtgctgcgttttgctgaacgtgctgattttctgataaacattgagctgaaaaacagtgtattccgttacgaaggaatggaagaagaagtgatcaaaaaagtcagatattacggactggaaaagcgcgttattttttcttcatttaatcatgagagtctcgcggtgtgccacgccctggcgcctgaaattgaacgggcggtgctgacaatggatgtgctgtaccggcctgaacgttatcttgccgccattcccgcttcgggttatcatccgaagctcggcacgccggcggtcagcgctgaagtgatcacacatcttgcaaaacaccaagcggcgctccgtccgttcaccgtcaatcgtcctgaggatatgaagcggctgatgaaagcggggatagacgcgatttttacagattatccaaagctggctgtttctataaaagaagaatgccgcagctgagaagactggtcagacagtcttctttttttatgggcgggaaaaaggcggtgcactcataactcggtcagccggttcatatattgtaacagggcgttttgtgtaagcgttatcttttatcttattgaaagtgaggcaaaattgtgggaaaaacggttatcgtcagtgcggcaagaacgccgttcggaaaattcggcggcgcattaaaagaggtgaaggcatccgagcttggcggcattgccataaaagaagcaatcaagcgcgccgctatcagtgaaagcgaagcggaaggagcggtgatggggatggtcgtccaggcgggtgccgggcaaattccggcacggcaggctgcaagatatgccgggcttccgtggtctgttccggctgaaaccattaataaagtctgtgcatcagggctcagagccgttaccatctgtgatcaaatgatccgggcgaaagacgcggacgtgctgattgcaggcggaatggaaagcatgagcaacattccgtacgccattccggccggccgctggggtgtgaggatgggggacggggtttttcaggatttaatggttcatgacgggctgacctgtgcgttcgaccaggtgcatatggctgtccacggaagcactgcggccaaaaagtacggcatttcccgagatgaacaggatcattacgctcttttgagtcagaaacgcgcggctgaggcggctgatgcgggcaaattgcgtgaagaaattgtccccgtcacctggaccggcaaaaagggcaaacagcatatcgttgaagcggatgaggggctgcgtcctgatacaagccttgagcagctcgcagcgctcaagccgattttcacagccgacggaacggttacagccggaaacgctcccggtgtaaatgacggggccggagcatttgtgctgatgtcagaggaaaaagcagcaaagcagcatgtcaggccgctcgcagcgatacttggctttgcgtccgtcggactggaagcgtccgagctggcaagcgcgccgggagaggccatcagccggctcttgaaaaaaaccggactgtccgttgacgatattgatttgtttgaagtaaatgaagcatttgcgtccgtcgtgctcgtgagtgaaaaaatagccgggttcagccgggagaaagtgaatgtaaacggaggggcaatcgcgttcggccacccgatcggcgcaagcggagcgagaatcgtcatgagtttaatatacgaattaaagcgtcgcggaggggggttaggcatagcggctatatgcagcggagcggctcaaggagatgccgtcctgctggaggtgtactgatcaaaggagggagcgccggatgaagatgaaaacaatcatggtcgcaggtgccggtcagatgggggcaggcatcgctcagacggctgcagaagccgggtttgccgtcaagttatacgattgggagccggaaacggtaacaaaaggtcttcaccgcataaagacaaacctggagaaagagcaggcaaaaggacggaagtcacagcaggagacagatgccgttttcagccgtatttccccggcggagctcacagaagcgggagatgctgattttatcattgaagccattgccgaaaacaaaaaagcaaaagcggaattgtttgacacacttgataaaatctgtccccctcatgccgtattggcaagcaatacgtcttctcttcctattacggagcttgccgcggccacaaaaaggcctgaaaaagtaatcggcatgcattttatgaatccggttccggtcatggagcttgtcgaagtcatcagaggactcgccacatcggaagaaacggcggaaacagtaaagaagcttgccgtccggatgaataaaacccctgtcgaagtcaatgacttcccgggctttatatctaatcgcatattaatgccgatgattaacgaagccgtttattgcctttacgaaggagcagcttcaaaggaagcgattgatgaggtgatgaagctcggcatgcgtcatccgatgggtcctttaacattagctgacttcatcgggctggatacgtgcctttccattatggaggttctctacgcggggctcggagatccgaaataccgcccatgccctctgctcagaaaatatgtcagcgccggctggctcggcaaaaaaagcgggcgcggtttttatgagtacggcagatgacgtaaagatcatgaggggagacggcagccatgcattttactgaagagcacatcatgatgaggaaaatggtgcgtgattttgcccgcaaggaaatcgcaccgatggttgagctcatggaatcaacagatgaatttccggagcggctgattaaaaaaatgggcgaagcgggattgatgggcattcccgtcccggaagcttacggcggggcgggtgctgatacaacatcttacattttagcgattcatgaaatatcaaaagtcagcgcggccgtcggcgtcattttgtccgtccacacatcggtagggacaatcccgattttgcatttcgggacagaagcccaaaaacaaacgtatattccgaagctggcagcgggcgaatatattggagcttttgcgcttactgagactcactccggatctgatgcgggaagcctgaaaacaacagccgtgcgaaaaggcggttcatatattctgaacggttcaaaaatctttattacaaacggcggagcggcagatctgtatctgacatttgccgtaaccgatccgggtaaagggagaaagggaatttcagcgtttattgttgaaaaaaacacacccggtttttctgtcggaaaaaaagaaaaaaagctcggattgttaggttccaatactgccgaattgcagtttgatcaagcggaaattccgattgaaaaccggctcggcgaagagggcgagggtttttcaatcgccatgaaaaaccttgacgtcggacggatcggcatagcggctcaggcgctcgggattatcgaagcggcgctcggctgctcggcggagtacgccaaaacccgcagccagttcggcagacccatcgcttcgaatcaggccgtttcatttaaattatctgacatggcaacgaatgcggaagctgccaaattattggtctatcatgcggctgatctgtatcagcgagggcttccgtgcggaaaagaagcatctatggcgaagcaattcgcgtccgatgcggcgatgaaagcggcggtggaggctgtgcagattcacggcggctacggctatatgaaagagtatcccgcggagcgtttatttcgggatgcgaaagtcacgcaaatctatgaaggaaccaatgagattcaaaggctgattatttctaagtatcttcttcaataaaaagtgcgcaaaggagcgaaactatggaatcttattctcccggtttagatggcgtcattgcggtggaaacggggatttctttcctggatacacagcagggcagtattttaatcaaaggccacgatctgattgagctttctaaaacggccggctatatggacattgttcatctcttattggaagacagacttcctgatgcgaaagagaagaaggcgcttgaagaagacgttcggcgcggcggacaccttcccgaggaaatcttgcgtatatgccgtctgctgcccgaacgtactcacccgatggacggactgaggacaggtttgtccgcgcttggaggctttgataaggatattgataaccgcacctcttctgtaaatcggcaccgtgtccgcgggctgataggcaaaatgcccaatctgaccgtcaacagctatcgagtcatcaacggactggagcctttagcgcctgtcggaaccttgtcgtacagcgcaaactttttatatatgattaccggaaaaacgccgtcctccttggaagaagaaatattcgaccggtcgcttcttttatacagtgagcatgaattgccgaactcaacgtttacggcccgtgtcattgcttcgacgcaatcggatatttacggcgctctgaccggagcagtcgcctcgcttaagggaaaccttcacggcggagcgaacgaagcagttatgtacatgcttgaggaagcgaaggatacagacgggtttacacaattattaactcaaaaactcgcaaacaaagaaaaaatcatgggcttcggccaccgtgtctacatgaaaaaaatggacccgagggcgctcatgatgaaagaagcgttgaaaaaactgtctgatctttcaggtgatttccgtctttatcatatgtgtgaagcaggagaaatcgtcatgcgggagaaaaaaggcctttacccgaacttagattactacgcagcgccggtctattacatgctcggcatcccgatcccgctgtatacgcctatattcttcagcgcacggacggtcgggctgtgcgcccacgtcattgaacagcacagccgaaaccggcttttccgcccgcgtgtccgctataccggagcgcgtctgtaaacagatgagaaaggaagatgaaaacatgacagaaccccgccgaatggacgccgtaatcgaagagatttctgactacgtgctccatcaggagattgacagttcggaagctttcactacggcaggacatgtgcttcttgatacgataggctgcggaattttggcgctcagctatcccgaatgtacaaagctgctcggcccgattgtcccgggaacctccgtgcccaacggcagcagagtcccgggcacgccttttgttttagacccggtcacggctgcctttaatatcggctgtatcaacaggtggctcgattataatgatacgtggcttgcggccgaatgggggcatccgtctgacaatctcggaggcatattggcttgtgcggattatatatccagagtgcggatttcagaagggaaagaaccgcttaccgtgcgtgatgtgctttgcgcaatgatcaaagcgcacgaaattcaaggaattctcgctttggaaaacagtttaaacagagtcgggcttgaccatgtgctgtttgtgaaggtggcgactgcggctgtttgcgcacaaatgctgggcggctcaagagaggaaatcaataacgccgtatctcacgcttggattgataattcaagcctcagaacgtatcgtcatgcgccgaacaccggatcacgcaaatcatgggcggccggcgacgcgacgagcagaggcgtatatttggcccttatggcgcaaaaaggtgagatggggtacccgacggctctgaccgcatccgggtggggatttcaagacgtattatttaaccggcaggaaatgaagcttgcccgcccgcttgggtcctatgtgatggagaatgttttgtttaaagtatcctatccggctgaattccacgcccagacagcggcggagtgcgcggtccggcttcatccggaggtgaaagaccgcatcgaagacattgacaggatcacgattatgacccatgagtcggcaatccggattatcgataaaaaagggccgcttcacaatccggctgaccgggatcactgcctccagtatattacggcaatcgggctgcttttcggagatatcacggcggatcattatgaagaggaaacggcgtctgacccgcgaattgatacattgcggagcaaaatggaggtgacggaacataaagcgtactcaaaagattacttagacccgaataagcgatccatctcaaatgccgtacaggtgcattttacagacggcacggctacgggacggattgaatgtgaatatccgctcgggcaccggttccgcagaaaagaagccgttccgaagattcttgccaagttttcagcaaacatcagcactcatttttcattgaagcagcagcggaaaatcgaagaggcctgtaaagatagcggccgaatgcagaagctcagcgttagtgaatttatggacttatttctcatataaaataggagggtgacaaacatgacgtggatcgtcagcaagcagtcgtctcaagaggagcttgcagagcggttccgtacgctgatggcagcgccggatctattgcagattccaggcgctcacgatgcgatggccgctcttattgccaagaaaacgggtttttcggctctttatttatcaggcgcggcttacacggcgagcagagggctgcccgatttaggcatcatcacgtcggcggaaatggctgaacgggttaaagatctggtccgctcgtctgatctgcccgtccttgtcgatattgacacgggtttcggaggcgtgctgaatgccgcccggacggcgaaagaaatgtatgaagcgcgcgcggccgccgtccaaatggaggatcagcgcctgccgaaaaaatgcggacatctgaatgggaagcagctcgtgccgattgaagaaatggcgcaaaaaatccaagcggtcaagcgggccgcgccgactcttcttgttgttgcgagaacagacgccagacagcaggaagggctggagggggcattaaaaagggcgtccgcttatataaaagcgggtgctgacgctgtttttccggaagcgctccaatacgaaagtgaattcagagcgttttccaaacaaatcagtgtgccgattctcgcaaatatgactgaattcggacaaacgccgtattacagtgctgatgaattttccgatatgggctgtcagatggtcatttacccggtcacgtcactcagaacggctgccaaggcttttgagcgtattttccgccttctgaaagaagaaggctctcaaaaagaggggctttcggatatgcagacgagaaaagaattatatgaaacgatcgcttacgatgactatgaagaactggatcaatccattgccaaaacgatactgccggacgactgaaaaagcccttttttgcaagggctttttttacagcttttttttcctgaaccgcgggctgacttgattgcgtttccgatctctgtacaaaataaacccggccagaacataaaggccgaacaaaaaaaacgccaatccggccgccccctgaagaaaaagggacggaaacggggaaaacgcatgcccgaataatgcatctctcatcagtttaatgccgagcgccgcgacagcgccggggaggaccagaatcaaaagcgcaacaagccggctcatattcagaaaacccctttacgatatgatttcctttattgtccaatcgaaaaaatattttgtcaagagatcaaaacgtggtaacataggggttgtgcaaattattgcaacgggaaatacaggtgtgcaaattttttcatataaaggggtatcgggatgcagaaggtgctgattataggtgctggtaaaggaggcacggcgctcctacagattttgatgaaaacaaaactgatccggattattgcggtggttgatcaagatccggaggcgcaagggctgcaagaagcccggagatatggaattgcaacctcatcagattggaaaccctacataactgaagatatagatattatcatccatacaacaggcgataaagcggtcatggatgagctgctccatgagaaaaaagaacaaaccatcgtcatgccgggaaaattggcgtacatggtgtttcagctgatggaggaaaaacagcagcttatccaaatgctgaagtcgcagacgtataagcatgaccggatttttaattcaacgcacgacggcatgatttttatagacgtcaacgaaacgatcattttatttaatcagatggcagaaaaaatggtcggccgaaaacgggaggatgtcatcggccgccaaattaaagatgtagtgccgaacacaaagctgccgcggattctggaaacgagagagccggaatataaccagaagcagcttctcggcaagcacctgcagattgtcacgacaagactgccgatcattgatgaaggcggaaaacttctcggcgcgttatgcgtgtttaaagacatcaccgacgcagttgaactggcggaagaggtcacgaacttaaaacaaatccgcaccatgcttgaagcgattattcaatcgtcagacgaggccatttccgtcgttgatgaaaacggcatcggaatgttaatcaacaaagcatatacaaaaatgaccgggctgtcagaaagcgaagtcatcggaaaacccgcttccaccgatatctcagaaggggaaagcatgcacctgaaagtattggggacaaggcggcccgtgcggggtgtgaggatgaaggtcggccccaataaaaaggatgtcatcgtaaatgttgcccccgttattgtggatggtattttaaaaggcagcgtcggcgtcatccacgacgtgtcagaaattaaaacgctgactgctgagctgaatcgggcgcgccagatcatccgcacgcttgaagcgaaatacacgtttgatgacattatcggcacgagtgaacaaatgctggttgcccttgaacaggcgaagctcggggcgaaaacgccggcgacgattctgctgcggggagaatccggcacagggaaagaacttttcgcccacgccatccataatgaaagcgaccgaaaatacaataaattcattcgggtcaattgtgcggccctgtctgaatccctgcttgaatccgagcttttcggctatgaggaaggcgcgtttacgggcgcgaggcgcgggggcaaaaaaggactttttgaggaagcgaataacggcagcattttcttagatgaaatcggagagctgacccaaagcacccaggcaaagctgctcagagttctgcaggaaaaagaaattatcagagtcggcggcgcaaaagcgatttctgtcaatgtcagaattatcgcagcgacaaacgtcaacatcgaaaaggccatggcggaaggcgcgttccgcgaagacctgtattaccggattaaccgctatccgatctcaatcccgccgcttcggcagcgcaaagaagatattgaagcgctgagcattcggctcattgaaaaaatcaatcaggattacggccgcaatgtaaaggggctcacgccgaacgcgctgcgagctttatcagcctacagctggccgggaaacgtacgggagcttgaaaatgttctcggacgggcaatgatatttttagagccgcatatggaacggatcgaacagcagcatctgcctgttttcgaatcagagctgaatgacaaaaacggcacccaaagtgattttccggatgtagaaggggaaaagctgtctcaggctgttgaaaaatttgaagcgcacatcattcaaaaaacgcttgaaaagcataaattcaaccgaaccaaaacggcgaaagcgcttggtgtcagcattcggaatctgtactacaaaatggacaagtacggccttgcaaatgacggcatgcaataaattgcagagaaagcgcaaaccgctgcatgttttcttgaaaaaagccggaataaaccctttcgcatatttggcacagaacttgcattgttaaaagcggattcgcacaagaaaggtggtacaaaatgaagctgagagacctagttgaaaaagccgcggcaaaaaacgcaaaaaccattgcagtggcccacgcagcagataaagaagtgatccacgccgtcaaaatggcggcagaacacttgtcggcacgatttttactgacgggtgacagcggaaagctgaaagagcttctggcaaatgagccgaagttcaatgctgacatcatccacgccgattcaccagaagaatctgcggcaaaagcagtgcgcgcagtgcgtgaacaagaggcggacgttttaatgaaagggaatctcccgagctcaactcttctgaaatcggttttaaaccgccaggaagggcttcgttcaaaaagggtgttatcacatgtagccgtttttgaagtgccggactatgaccggctgatgtatgtgactgattcagcgctgaacattgccccgtctcttgaagagctcgggcatattctgcaaaatgcggttcatgtcgcacattcagtagggaaccctatgccgaaagccgcagtccttgcggctattgaaacggttaatccgaaaatggaggcgacgctgaacgcggctgcgatcgtccagatgtgcaatagaggacagattaccggctgcattgcggacggaccgcttgctttggataatgccgtatcccaagcggctgcgctgcaaaaagggatttccggaagcgtagcgggccaggcggatattctcttggttccttcaatcgaggccggaaatatgctttataagtcaatgatttattttgcgaaagcaaatgttgctgctgtcatcgccggtgcaaaagcgccgattgcattaacgagcagagcggataccgcagaaaataaactgtattcaattgcgcttgcgatttgcgcatcacaagaacagtaggaggaacgaacctatggaaatttttaaatatatggagacttatgattacgaacaattggtattctgccaagatgaacaatccggattaaaagcgatcatcgcgattcatgatacgacgctcggccctgcactcggcggaacaagaatgtggacatatgacagtgaggaagcggcgattgaagatgcactgagactcgcaaaaggcatgacttataaaaatgcggctgccggtttaaacttaggcggcgggaaaaccgttattatcggagacccgcgcaaagataaaaatgaagaaatgttccgcgcgttcggccgctacatccaaggcttaaacggaaggtatattacggcggaagacgtcggcaccaccgttgaagatatggacatcattcatgatgaaacagactatgtaaccggaatttctccggcattcggttcatcaggaaatccgtctccggttacggcgtacggcgtctacaaagggatgaaagccgcagcgaaagcggcgtttggcactgattcactggaaggtaaaacaattgccgtgcaaggcgtgggaaatgtggcttacaatctatgccgccaccttcacgaagaaggcgcttctttaatcgtaaccgatatcaataaagaatctgttaaacgtgccgttgaggacttcggcgcccgcgccgttgatcccggcgacatttactcacaggcgtgcgatatttatgccccgtgtgctctcggcgccgtcattaacgatgacacgattaaacagctgaaggcgaaagtcattgcgggggcggccaataaccagctgaaagaaacacgtcacggcgataccattcatgaaatgggaatcgtgtacgctccggattatgtcatcaatgcaggcggcgtcatcaatgtggccgatgagctttacggctacaacgctgagcgtgctttgaaaaaggttgagggcatctatgcaaacattgagcgggtgctcgatatttccgcgcgtgacggcattccgacatacttagcggccgaccgtctggctgaggaacgaattgagcgcatgcgccgttcaagaagccagtttctgcaaaacggccaaagtatattaagcagacgataggaatttgatctggaggtatgaaaatgttcgaacaggaaaaacgcattctcattctgaatccaggctcaacatcaacgaaaatcggtgtctttcacaatgaacgctgtatctttgaaaagacgctgcggcatcccgaagaagagctgaaagcatttaacggcattatcgaccaatacgaatttcgaaaaataagcattcttgagtctttgcacgaacagggcatcaacatttcaaagtttgatgccgtttgtgccaggggcggcctgctcagaccgattgagggcggcacatatgaagtgaatgacgccatgatcactgatttgaaaaacggctacaacggccagcatgcttctaatctgggcggaattattgccagggaaatagcagacggattaaatatccccgcgtatatcgtcgatccggtcgtggtggatgagatgactccgctcgctaaagtatcaggaatgcctgaaatcaagcggaaaagcatttttcatgctttgaaccaaaaagctgttgcccgtcatgcggcggcgtccctcggcaaacggtatgaacagatgaagatgatcgtcactcatatgggcggcggcatcacagtcggggtccatgattgcggacgggtgacggatgtcaacaacgggcttcacggagaagggcccttcagcccggagcgtgcgggaaccgttcctgcgggtgatttggtggagatgtgtttttccggcaagtattcaaaagccgatatgatgaaaaaacttgtcggcacgggcggactctccggctacctggggacaactgacgcggtgaaggtggaaaaacgcattcaggccggagatgagcatgcgaggctcatttatgacgccatggcttatcaagtagcaaaagaaatcggggcggcaagcgccgtattaaaaggaaaagtagacattatcgtcctgacgggcggattggcgtacgggaaaagtttcgtatccgccatcagatcgtacatagattggatttcggatgtactggtgtacccgggagaaaatgaactgcaatctctcgcgcaaggcgcgcttcgggttttagccggcgaggagcagtcaaagcaatatcagatcggcgaaggagtgaaaacaaatggcgactgaatatgatgtggtcattctgggcggcggcacgggcggttatgtagccgccatcagagcggcccagctcggcttaaaaacggccgttgtagaaaaagaaaagctcggcggaacatgcctgcataaaggatgtatcccgagtaaagcgctgttaagaagcgcggaagtgtaccgaaccgcaaaggaagcggcagcattcggcattgaaacggaaggtgtctccctccgctttgacagcgtgcaaaaacgaaagcagggaatcgttgaccggctggccggcggtgtcgcccacttgatgaaaaaggggaagattgatgtattcaacgggtacggacgtatgctcggcccttccatcttctcacctcttcccggtacggtttccgtcgaatacgcaaatggtgaagaaaacgacatgctgataccgaaacaattgattatcgcaaccggttcaaggccgaaaatgctgccgggtttagaagcagacggtacatatattctgacatcagatgaagcgcttgagcttgagcgtctgccccaatccatgttgatcgtcggcggcggtgtcatcggaattgaatgggcatccatgctgaacgatttcggcgtcaatatcactgtgattgaatatgcggaccgcattttgccgactgaagaccatgatatttcaagcgagatggaaaaactgttaacgaaaaaaggaattaagattgtaacgggtgcgaaagtgcttccggatacattggaaaaagcggatggcgtttcaattgccgctgaaaagaatggaaaaaaagaaacgtatcacgccgaacaaatgcttgtttccatcggccgccagccgaacattgaagggatcggtcttgaaaacacggacattgcagcggaaaacggttctatcatagtaaatgaagccggacagacgaaggaatcgcatatttatgcgatcggtgatgtcgtcggcggtctgcagcttgcgcatgtggcctcccgtgaaggcatcattgccgttgagcatatggcgggtcttaatccggctccgcttgatgccgctcttgtgccgaaatgcatttattcaaatccggaagcggcgagtgtcggtctgacagaagaagaagctgcccgaaaaggacatgaacttaagatcggaaagtttccgttcatggcaatcggaaaggctcttgtatacggagaaagcgatggctttgtcaaaatcgtcgccgaccggaatacagatgatattctcggtgttcatatgatcggcccgcacgtcaccgatatgatctctgaagcggggcttgccaaggtgctcgacgcgacgccttgggaaatcggccagtccatacatccgcatccgtcgctttcagaagcgattggggaagctgcgttagccgcagacggaaacgcgattcatttttaaaaggaaagaaggaggggtttgaatgactacaaaccgccatcaagcattagggctttctgacgaagaagccgttgaaatgtatagaaccatgctgttagccagaaaaatcgacgaaagaatgtggctcttaaaccgctcgggcaaaattccgttcgttatttcatgtcaagggcaggaagcggctcaagtaggcgcggcctatgccctaaaccgcgataccgactatgtgcttccgtactacagagatatgggggttgtgcttgcattcggtatgactgctaaggatttgatgatgtcgggttttgcgaaagcggctgatccgaactcaggcggaaggcagatgccgggccacttcgggcaaaaggaaaacagaatcgtaacgggctcatcccctgtgacgacgcaggttccccacgcggtcggaatcgcgcttgcgggacgcatggataaaaaggatatcgtctctttcgttacctttggagaaggttcttccaaccagggagattttcacgaaggggcaaactttgccgccgtgtataaattgccggtcattttcatgtgtgaaaataataagtatgccatttccgttccgtatgacaaacaggtggcgtgcgaaaatatttccgaccgggcggcaggctacggcatgccgggagtcacagttgacggaaacgacctgctggaagtttaccgggccgtgaaagaagcgcgcgaacgggcatctaaaggcgaaggtcctacattaatagaaacggtttcctaccggttgacgccgcattccagtgatgacgacgacagcagctacagagaacgcgaagaagtagaagaagcaaagaaacaggatccgcttcttttatacaaagcatacttgcaagaagccgggcttctaggtgaagaagaagaaaaggccatgctggatgacatcatggctatcgtaaacgaagcgacagacgaagcggagaaagcgccatacgcatctcctgaatcaacgcttgatcacgtttatgcgaagtagggaggaatacttatgtctgtaatgtcttatattgacagtattaatgcagctatgaaagaagaaatggaaagagatccgcgcgtttttgtcctcggggaagacgtcgggagaaaaggcggcgtatttaaagccacggcgggtctctatgaacagttcggagaagagcgggtgatggatacgccgcttgcggaatcagcgattgcgggtgtcggaatcggcgccgcgatgtacggcatgcgcccgattgccgagatgcagtttgccgatttcattctgcctgcggtcaaccaaatcatttcagaagcggccaaaatacgctaccgttcaaacaatgattggagctgtccgatggtcatcagagcgccttacgggggcggcgtgcacggcgcgttgtatcattcccaatctgtggaggccatttttgccaaccagccgggtcttaaaattgtcatgccttcaactccttatgacgcaaaagggctgttgaaagccgcagtccgtgacgaagatcccgtgctgtttttcgaacataagagggcgtaccgcctgattaaaggagaagtccctgctgatgattacgtccttccgatcggaaaggcggatgtaaaacgcgaaggcagcgacattactgtcattacgtacggattatgcgtccatttcgctctgcaggctgccgagcgtcttgaaaaagacggaatttccgcgcacgtattagacttgcgtacggtttatccgttagataaagaggctatcattgaagccgcgtctaaaacgggaaaagtattgctgatcacagaagatacgaaagaaggcggtattatgagcgaggtcgccgccattatttctgaaaactgcttatttgatttagacgcgccgatcaagcggcttgcaggccctgatgttccggcaatgccttatgcgccgacaatggaaaaatacttcatgatgaatcctgacaaagcggaagccgcgatgagagaattagcggagttttaaagacgtaaggaggtttttgacatggcgattgaacaaatggctatgcctcagctcggagagagcgtgacggaagggacgatcagcaaatggctggtatccccggtgatcaagtgaataaatatgaccccatcgcggaggtcatgacggataaagtgaatgcggaggtgccgtcttcttttaccggtacgattacagaacttgtaggagaagaaggccagactcttacagtcggcgagatcatctgcaaaattgaaacggaagaaacggaaaccgaagaggcgccgaagcgggaagaagagcagaataccccttcagacaccgatgcaaaccgtcaaggtaaagaccagtcaaataaagcgcgttattcgccggccgtgctcagattagcgggagaacacggcattcagcttgaagaagttgaaggaacgggcgcaggaggaagaattacgcgaaaagacattcaaaagatcattgattcgggaatgcagcagaagtcggaagcaccggcgccggctgccgttcaaacaacgcaacaagcgccgaaacaacagcaaaaacaagcgccggcgccagttctgtcagccggtgatattgaaattccggttacaggcgtcagaaaagccatcgccgccaatatgcataaaagcaaaacagaaattccgcacgcctggacgatgatggaagtcgacgtcacgaacatgacggcgtacagaaacagcataaaagactcatttaaacaaaaagaaggcttcaatttaacatttttcgctttctttgtaaaagcggcggcgcaggctctcaaagagttcccgcagatgaacagcatgtgggcgggagacaaaatcgtccaaaagaaagacatcaacatctccattgccgttgccacggaagattcgctgtttgttccggttattaagcatgctgatgaaaaaacgattaaaggcatagccagagaaataacggaccttgcgaaaaaagtgagaaacggaaaacttaccgcggaagatatgcagggcggcacatttaccgtcaataacacgggatctttcgggtcagttcaatctatgggcattatcaaccatccgcaggcggcgattcttcaggtagaatctatcgtcaaacgtccggttgtcatgaataacgggatgatcgcagtgcgtgatatggttaatctttgcctgtctttagatcacagagtgctcgacgggctcgtatgcggccgtttcctcggacgcgtcaaagaaatcttagaaaacattgacgaaaatacttcagtctattaaaaaaactccttttgcccgggcggcaaaaggagtttttttattttcattgtgaatcctcgggaacaagcatagtgagatgatgttttttcacttcgatcgtacaaggcgttgttccgtatacctcgccatctgtatccgcgtccatttcacgtccggtttcgatttcaatcctggaggcctgaatataggacagctcccctttgaaatcatcaaacgaaccctgctccatcgtcatcagctcccgcaacgcggcaaggcttgtgttgcggcagattaacacatcggctaagccgtcccggaggctcgcatcaggcaggggaactctgtttgtcccgatataatgcccgttcatgacaagcaccattacggcttcgtcttctttcacctcgccgtcaattgtcaatttgacaggaaacgggttcgcacttgtcatcgtccgcaaggcgctcgtgaagtagctgattttaccaagccatgctttttcagtttcattgatatggctcgatgcttcggtgatcaatccgatgccccagaagttcagaaaatagccgtcatccgttttacagacgtcaatcatccgtttatgtccggccgcgagcgcttcagcggccttttgaaggttttgcgggatgccgagcgcccgtgagaaatcgttgcacgttcctcccggcaaaatgccgacagcgggcctgttatcaagcttgctgatgctgttgatgcattgatgcacagtgccgtctccgcctaaaatatataaatggtcaactgaactgtcgaggttttcacaatactgacgggcatcgtcctgatgtttggtcggtttaatcaaaagttcgtcagctgactgggccaaaatggggacgaccgtgccgagcgttttatcaatctgtttttgaccggcgtttccgttataaattaatactgctttccgttggctcatacgactgctcctttatttcagacaatctctttaacaagtttcccgtttttaaaaggtcataaacttacatcaggtacataaaaggaacaaaaaacaatttggatatgagcggtgtcatttgccgatagtgaggttccttgctatcataagaaaagatgatcaaaaaggagaggtcccagttgaatatggattttaatttatttatgaatgatgtcgtgcgtcaagcccgccaggaaatcacggccgccgggtatacagagctgaaaaccgctgaggaagtggacgaagcgctttcgaaaaaaggaaccacactcgtcatggtcaactctgtgtgcggatgcgcaggcggtattgcacggcctgccgcataccattctgtacattacgataaacgcccggatcagcttgtgacggtatttgccggacaggataaagaagcgacagccaaagcgagagaatactttgaaggctatccgccgtcctctccgtcatttgccattttaaaagacgggaaaatcatgaaaatggtggaacgccatgaaattgaaggccatgagccgatggccgtcgtcacaaaactgcaggaagcatttgaagaatattgtgaagaagtataagtgaaagaaaaaccccggagccgagcgcttccggggttttttatatggaatctgtataaatataaatatttatacaccggcgttcagctgtcactaatcggaaaaacaatgactataataaacagagaaaggaaaatatatttttcaaaaatagtattgcatcacaattaaaaagtgtttaaaatacaagttaacgaataaatattcaattttaagagatcagtagatatgggggaaatgaatcatgaagaaatggctgttggtattagctgccgcatgtatcacctttgcgctgtccgcctgcggatcaggcaattcaggctcagagggcggaaagaataagctgattatgggtacatcggctgactataaaccatttgaatataaagacggcgatcagatcaccgggtttgacgttgatctggcaaaagctctgggcaaaaagaccggctatgacgttgaggtgcaggacatggacttcaacagcctgattacagccttgaagtccaagcaggtagatatgattttatctggaatgacacctacgccggaacggaaaaagcaagttgatttttctgatatttattatactgctaacaatatgattgttacgaaaaagggaagcagcattaaatccctgaatgatctgaaaggcaaaaccgtcggtgttcagctcggctccattcaagaggaaaaaggcaagaagctcgcttcgaaatacggttttcagctcgaagaccgcaaccggatctcagacttaacggaagagattaaatccgggcgttttgatgccgcgattatcgaagacatcgtagcacaaggctatttcagttcaaataacgatctgcagggctttgcgtcagcagatgcgaaatcagacgaatcgggctccgcgattgcgttccgcaaagacagtgatctgacagcgaagtttaacaaagcgctgaaagaaatggagaaaaacggagaaatcgaaaaactgaagaaaaaatggttcaccaacgagaaataaaaggaagctcaacttttcgttgagctttttatcttgaataaagacaaaggagatcacacgtatgaatttggatttctcagcgacaatcccccaaattccttttatattggaaggccttgcggtcacattaaaaattgtgctcgtttcagcggtcatcggtcttgtattaggaatcgtgctcagcttatttaaaatcagcacgatcagtccgctgaaatggattgcggatttttatacttcgatattccgcggcacgccgcttgtgctgcagctgatgatcatctatttcggtatgccgcagcttctcggctttcagatcgatcaattttgggcggcggtcaccgcattatcgctcaattcagccgcttacgtctctgaaattatcagagcgggaatcaacgcaattgacaaaggacaaaaagaggctgccgtcgctctcggcgtgccgtacggaaaaatgatgaaagatctgctgctgccgcaggcgtttaaaaacatttctccggctattattaacgaattaatcaccttgacgaaagaatcggcaatcgtcacggtaatcggtctcggcgatattatgagacgggcctaccagtccggcgccgcaacatacaactatttagaacctcttattgtggcgggcttaatctattacgtgctcgttttgatcttagcattcatcggaaaaggcgtagaaaggaagctgaaagccaatgattaaggtcgacaacctgtcaaaatcattcgggaaacatgaagtactgaaaaacatttcaacacagatcgaagaaggggaagtcgtcgccgtcatcggcccttccggttccggcaaatcaacgtttctgcgctgcttaaatctgctggaaaccccgagcggcggaacgattgccattaaagaaaacgaaatcaccgcagctaaaacgaataaactgaaagtgcgggaaaatatcggcatggtatttcagcattttcatctgtttcctcataaaacggtgcttgaaaatatcacatacgcgccggtcagcgtgaagaaagagtctaaaaaggatgcggaggaaaaggcgtgcgctctccttgaaaaagtcgggctgcttgacaaacggaacgactatccgaaccgtttgtcaggcggacagaagcagcgggtcgccatcgcgcgggcgcttgccatgaatcctgacatcatgctgtttgatgaaccgacctcggctcttgacccggaaatggtcaaagaagttcttgaggtgatgaaagagctcgcgcagacgggcatgacaatggtgatcgtaacgcacgaaatgggatttgccaaagaagtcgcagaccgcgtattatttatggatgaagggacgatcgtggaagacggtcagccggaagaattttttctttctccgaagtcaaaaagagcacaggactttttagaaaaaatattataaaatataactgtaagaaaagaagaagaatgctcttcttcttttttttgagaaagaaacaaacagaatggagcaagcaatgtttaaaatcggttaccggacactaaagaccgcacttggaacggcgctggccatttatttagcccagctgttgcatctgcaaaacttcgcatccgcaggaatcatcaccatattgtgcatccagattacacaaaagcggtcgcttcaggcctcgtgggcccgatttgccgcctgtttattggcgatcgtcttttcatatgtctttttcggactgatcggctattatccgtttgcgatcggaatattgctggtgctgttcattccgactacagtcgttttaaaaataaatgaagggatcgtcaccagctcagtaatcattcttcatttatatatgtccggcggcattacgatggcgtttatctggaatgagttccagctgatcaccgtaggtatcggcgtcgcgctgttaatgaatctgtatatgccgagcctcgacagaaaactcgcagcgtacaggaaaaaaatcgaggacaacttttccgtcatcttcgccgaaatcgaacggtatttgttaactggtgagcaagattggacagggaaggaaataccggagacgcatcagatgattcaagaggcgaaaaacctcgcctatcgggacgtgcagaatcatattttgcgccatgaaaatctctactatcattattttaagatgaggcagaaacaatttgaaatcattgaacggctgctgccgaagattacctctatttcaataacggtggagcagggaaaaataatcgcccatttcatccatgaattaagggaagccattcatcccggcaataccgctcataaatttttaaaaagacttgcagaaatgagaacggaatttgaagaaatgccgctcccggcaacgcgtgaggagtttgaagcgcgggcggctttgttccacctcctcggtgagatggaacaatatctcgtgattaaaagttatttcaaaggcatcaagctgtaaaaaacatatggatcaatcgcatgagtcctcctttcattggtcattctaatgaaaaaaggaggggagcccatgcgattttttttattgtcagccgtcctgctgctgtctccgctttggccgcttggcgcgaaccctttgccgggtgacccttatattatcgtcaataaagccacaaatgcgcttgctgttgtaaaggataaccgaatagaaggcatttatcaggtggcgacgggaaaaacggatgatttgacgcctgaaggagaatttacggtaacggtcaaagccgtcaatccgtattaccggaagaaaaatgtagagggaggcgcgccggaaaacccgctcggcgtccgctggatcggttttgatgcgaaaggcaccgacggcagaatatacggcattcacggaacaaacagagaagagctgatcggggggtttgtatcaaacggctgcatccgtatgaaaaaccgggatgtcatccgtattttccggattatccctcccggaacgaaagtattgattacaaaagaaaaccgctcattcgaggacattgcaatagagcggaaagccctcataaaaaagcaggaaacccccttgcaatgaggcgcctgcttttttactgcaaatacatcataatgcctgagaggagggttgaaagtataaatacgcccaaaatgacgatgacggcgcttttcataaatttttgagacattgtttcactccttaagattactgtctaccattttaacgtgttttgcttatatgaacaagccatatcctatgggggaaagcaggtggccgcgctatgaaaaaacttgatcatgtcggcattgccgtcagctctattgaagccgcgagaggattttacgaacggatgctcgggcttacgtatatgggagacgagctggtaaacggccaaaatgtgagagttgcttttttagaagcgggaggcacaaagcttgagctgattgagccgctgtcggacgcgtctcccgtcagctcttttttacagaaaagaggcgaagggctgcatcatttggcattccgctgcgccgatatgaaggaaacgatcaaggagcttgaatcatgccgcatgaccttgcttcatcatgaaccgcaaaacggagcgggcgggaagaagatcgcatttctctctccaaaagaggcgaacggcgtcctgattgagctttgtgaaacaattgaaaaaggagaaactcaagatgaacatgagtgatcatatcagacacttaaacgaaagacgttcctttttaacaaacggcggcggagcggaaaaaaataaaaaacagcacaaaaaaggcaagctgacggcaagagaaagaattgactatctattggacgaagacagtttttcagagctgcagccgtttgccaaaagccgcacgcccgggtgccagaatgctccgggagacggcgttgttaccggatacggcacaattgacggacggcccgtgtatttgtttgcccatgactttaccgtactcggcgggacgctcggcgagacgcatgcggaaaaaatcgcggcggtaatggatctggcggcgaaaaacaaaaacccgatcatcgggctgaacgactcaggtggtgcgagaattcaagagggtgtggtatcattaaatggatacggtcatatctttaggcgcaacgtcctttactcgggagtgattccgcaaatttctgtcattcttgggccgtgtgccggcggtgctgtttattcacccgctttgacggattttgtgattatggcggaacatacgtcgcacatgtttattacaggtccgaaagtcattgaacaggtgacgggtgaacagattgacgcggaaagtttaggcggtgcgggaatacataatgtgataagcggaaatgcccactattccgcacgaacggaaaaagaggcactttcggctgtgaaaaccctgctttcttatctcccgcacggcggacagacggcactacccgttaaaaaggaagacgccagaccgttattaaacaccctcgttcccgcggacagttcgaaaccttacgatgtgttacaggtaataaaagagctggcggatgacggaacgttttttgacattcagccgtattttgccaaaaacattgctgtcggttttctgaaactcggacggcgtacagtcggtgttgtcgcaaaccagccgaaacacttggcggggagcctcacgattgatgccgctgacaaagcgtcgagattcatccgtttttgcgacgcgtttcatattccgctattgacgatcgctgatgttccgggatttcttccgggccttcagcaggaacatgcgggaatcatccgtcacggagcaaaattgctgtatgcttttgccgaagcggcggtgccgaaagtgacgctcatcatcagaaaagcttacggaggcgcttatgtcgccatgaattcgaaagggctcggagcagatcttgtattcgcctggcccaatgcggaaatcgccgtgatgggagcggaaggcgcggcgtcgattttatacagcagagacatacaggcttctggggacccggagaaaacgaagcgcgaaaaaaaagccatatacgaaaaggaaaacgccggtccgtataaagcggctgcctgcggtatggtggatgatatcatccggccggaagactcgaggaaaaaattgattcaggcatttgacatgcttgcgcataaggaagaggaaagaccgaaaaaaaagcacggtaatataccgctttaaacggagggaactgaaaatggtaaacgaaaaacgtctgcttgaagaatttcttgaactcgttcaaattgattcagagacaaaacatgaagcggaaatcagcaaggtgctcaaacaaaaattcactgatttaggattgagcgtaaaagaagatgatacaaaagaagtgacggggcatggagccggcaacttaatctgtacgttaaagggcacaaaagatgcggatacgatttattttacatcccacatggacacggttgttccgggcaaaggcgttaagccgattgtggaagacggctatgtaaaatccgacggcacgacgattctcggcgctgatgataagacgggccttgccgcaatgtttgaagccattaaagtgctgaaagaacaaaacatcgagcacggcaccattgaattcattatcacggccggagaagaatcgggattagtcggggcaaaagcaatggatcgttcagacattaccgcgaaatacggttttgcgcttgattcagacggaaaagtcggcaacattattgtagccgcgccgacacaagcgaaagtgagagcaaccattttcgggaaaacggctcatgcgggtgtagaaccggaaaaaggcatctccgcgattacaatcgcatcaaaagcaatctctaaaatgccgctcggccgtattgataaagaaacaacggctaatatcggccgtttcgaaggcggcacgcaaaccaatatcgtctgcgaccaggttgatattctggctgaagcgcgttcattagtgcctgaaaaaatggaagcgcaagtgcagaaaatgaaagaagctttcgaatctgctgcagctgagatgggaggccgcgcggaagtggacatcgcggtcatgtatccgggtttcaaatatcaggacggcgatcaggttgtggaagtcgcgaaaaaagcggcggcaaaaatcggccgtccgagcgaacttcagacaagcggcggcggaagtgacgcaaacgtcattgccggccacggcattccgacagtcaacctgtcagtaggctatgaacaaatccatacgaaaaatgaaaaaatgccgattgaagagctcgtcaaaacggcagaaatggtcgttgccattatcgaaacagcggccaactaaaaacgaagcacccagttgattgggtgcttttttcattcttcatgatattaggcttaaagctttgcagatacaagaaaaaaccctgccggataggttccggcagggtttcagtattatgatttggcgggctccgcctgagccgcagcctgtttctttttatgatgcgtctgctgtaaaagtacgttctgcactgtcaaaaacagtccgcttgtaaaccagtaaagcggcagcgcagccggtacgttaagcgaaaaaacggtcatcatgacagggaaaataaagaccatgatttttgctgactgcatcgcggccggattttgagcagccggtgaatatttctcgtttaatttttgggaaatataagcctgtaagaaatacatggccccgcgcacagtgatacaagaatatcagaatgccctaagctgaaccacagaaatgagtgtgaagcaatttccggcgttgagcggatggcgtaataaaaaccgatcaaaatcgggaattgcaccagcatcggaagacatcccattgccatcggattcagattgtgctcacggtaaagcttcatcatttccatttgcagttctttttgtttttccgcatctttcgtttgtttcattttagcctgaatgctgtcgacctgcggtttgatcacagccattttttcctggaacacccgctgtttcttaaattggttcacaaacaaaggcaatacaacgatccggacgataatcgtcaccagaataatcgacagtccgtactcaccgtggaacaggcccgccaccccttttaaaagtgccgaaaacggctcgatcaggtaatcgtggaaaaaaccgatattcccgaggcctcccgtctgagtctgagatgtcgccgcaaaagccgagcggcctgtgcacagtacgataaaaaataatcccaatacgatccacttttgatatgttttagacaattatgtttcctcctttatatcttcacttgccgttataaaaggaggaagctgacatcttcatcatcattcgccggtgaattcatgcggatgactttacgtatccaagttgtaatgcgatgatatataataataagaaagtctgttcggttcagctgaacgactgcttgatgttcatctattcgtttcgttctccaatgctcgcctgcgcggcgctcacgcaaaagaaaagcgatgccgatcgcggtcagagcgggaagaataattgtgaaaaaatcgactaaaaataaaaagtcattcattgactcaagaatcattttatcacatccattcagctcttattttactacatatatataaggttgtctatgaaaggaaaggaggcgccgggagtggccggaaaagggagaattatatttcatatcgatatgaacagtttttatgcctccgtagaaatggcgtatgatccgtctttaagaggaaaacctatcgccgttgccggaaacgtgaaggaacggaaaggaatcatcgtcacctgcagctacgaagcgagagcgcggggcgtaaagaccaccatgccggtgtggcgggcaaaacgcctctgtccggaactcatcgtcgtgcctccgaattttgaccgctatcggagttcgtcaaaagaaatgttcagcattctgagggagtatacggatttagtcgagcctgtttctattgatgaaggatacatggatattacggacacaccgcacagacacagggcgtatgagacagccgcagacattcaggcgagactgcaaaaagagcttttgctcccgtcaagcatcggcatcgccccgaataaatttctcgctaaaatggcgtctgacatgaaaaaaccgctcggcatcaccattttaagaaaaagagagctgccggacgtcttatggcctcttccgatagaagagatgcacggtataggaacgaaaactgcggaaaaaataaaaacgctcggcatcaaaacgatcggtgatttggcaaaaggagatgaacatgcgctgaaaacgcttctcggcataaacggcccgaggctgaaggataaagcgaacggcatccatcctgcagaagtcaatcccgagcggatttatgaatttaaaagcgtcggcaactcatccaccctgtcgcatgattcggctgactgggatgaattaacgggcgtgtttgaccggcttgcgctgtctgtgagcgaacggctccagcgtaaggaggtcatggcctgccggctgttcatcatgattcggtatgcggattggaaaacggtcacaagaagcatgaccctcagcaatccggctgatcagaaaaaagacatcatggaagcggcgatggaactgtttgacaagcactggaaccaaaacccggtaaggcttctcggcatcaccgggacggaactggttgaaaaacagcaggcgtataaacagcttgatctgttttcattcaaggaggacgcaaaggatgagccgatttttcagatgatgaacgagctgaatgaaaagtacggccaaaacctgatcagaaaaggcgccgttataaaaaaagaagaaagcaaaacaaggggcacgagctttaacagagacttttttcaggatgaaaagaaaaggtgaataacttgaaaaaaggggttatgtatgataatttctttagtataaatatcattttattttaatttaaattttaaaatggttaaacgtttgaagaagggacgttagaatatgtcaaaacaacaaatcggagttatcggtcttgcggtaatgggtaaaaatctggctcttaacatcgaaagccggggattttctgtgtctgtatacaacagatcaagcagcaaaacggaagagtttttagaagaggcaaaaggtaaaaatgttgtcggtacatacagcattgaggagtttgtccagtctcttgaaacaccccgtaaaattttattaatggttaaagcgggaactgcaacggatgcgacgattcaatctcttcttcctcatctggaaaaagacgatattttgattgacggcggaaatacatactataaagatacacagcgccggaacaaagagcttgccgaaagcggcattcactttatcggaacgggtgtatcaggcggtgaagagggagcgctgaaagggccttctattatgccgggcggccaaaaggaagcgcacgaactcgtaaaaccgattttagaagccatttctgctaaagtggacggggaagcttgtacgacatacatcggcccggacggagcgggacactatgtgaaaatggtgcacaacggtatcgaatacggtgatatgcagctgatctctgagtcatatttcattttgaaacaggtgctcggattgtctgccgaagagcttcacgaagtattcgctgagtggaacaaaggagagcttgacagctatctgatcgaaatcacggctgatattttcactaaaaaagatgaagaaacgggcaaaccgctagttgacgtcatccttgataaagcaggccaaaaaggaacgggtaaatggacaagccaaagcgctcttgacttaggcgtgccgcttccgattatcactgaatctgtttttgcgcgtttcatttccgcaatgaaagaagagcgtgtgaaagcaagcggccttctgtccggaccagacgttaagccggtcactgaaaataaagaagagctgattgaagcggtcagaaaagcgctcttcatgagtaaaatctgttcttacgcacaaggcttcgctcaaatgaaagccgcgtctgaagaatataactgggatctgaaatacggtgaaatcgcgatgatcttccgcggcggctgtatcatccgcgcggcgttcctgcaaaagatcaaagacgcatatgaccgtgaaccggagcttgacaacctgctgttagacagctacttcaaaaacattgcagaaagctaccaaggcgctcttcgccaagtgatttcacttgccgtagcccaaggcgtgccggtaccttcgttctcaagcgcacttgcgtattacgacagctaccgtacggcagtgcttcctgcaaacttgattcaagcgcagcgtgattacttcggcgcgcatacgtatgaacgcacagataaagaaggcattttccatactgaatggatgaagtaatgaagaagcccccgcattgattgcgggggcttttctgatattaaaaaccgcgggccgtcatgaacggcgccgcggtttttaaattttttcttatatattccaccagtggagaccgtctttttcaagaagatcgtccgaagctttcggtcccattgaccctgcttcataattcggagaaagggttttgtcggctgcccacgtttcggaaatcgcatcgacgaaattccaggaaagcgccacttcgtcccaatgggcaaagtttgtcgcatcaccgagcagacagtcatggattaatttttcataggcttccggtgtgttcatttcatcactgcagttgctgcagtagtccagcttaatcggctgagcatgagcggctccgcctaattttttagcgttcagatatagtgtgatgccttcatccggctgaatatggatgacaagcaggttcggatttacattcgtttcattgccgtaataaaggttcatcggaatgtctttaaattgaacgacgattttcgttgatttttctttcatccgtttccctgttcggatataaaacggaacgccggcccagcggaagttatcgattaacagctttccggacacgaatgtttccgtattggaatccggtgctacattatgctcatctgtatagcttggtacagagtttccgtcaatcgttcccgcttggtattgtccgcggacgaagtagtcactcacttcgtttggagcgacagggcggagagctctcagcaccttcactttttcgctgcggatttcttccgtgttcagtttaatcggcggttccatcgccaagagagcgaccatttgcaaaatatggttttggaccatatcacggagtgcgcctgatttttcataatatctcgcgcggtcttcaacgccgagatcctcgcttgacgtaatctggatgtttgagatgtagcggttattccacagcggctcaaacagcgcattcgcaaaccggatgacttcgatattttgaaccatttgtttgcctaaataatggtcgatccggtaaatttgatcttccgtgaaagcttcgcgtatttctttgttaagctctttcgcactcggcaggtcatggccgaacggtttttcaatgacgagacgggaccagccatttgtcgctgtgacaccttcgtttttaagtgattttgcgatcgtgccgaaaaactcaggagccatcgccaagtaaaacattctgttgttcgggatttcatatgtatgttcaagctgatcaagcaggacattcagctcctgataggaacccggattcgttacatcaaacggatggtaataaaaatgagatgtgaaatcgtctatgtctttttgcccggcagaagaaacagacgttttaaccgtttcccggaggtcctcgtttgaccaaggtcttcttccaacacctacaactgcaaactcttcaccaatttgaccatttttatataaacggtgaatggatgggtaaagttttcgttttgccaaatcccctgtggcaccaaatattacaattactgcttttggtttgtcgtttgttttcacttagagtacctcactttatctgaagcatggtttaaaaccccgcatatttccttcattttaaatctaaaattcattgaaagcaaacatttcagcctgttttttgcggtttgcggaaaaaaattaatcaggccggagaaggcccgggtgaattcacattttcagtctgatcctgtatccttagtagtacaaagatctaggaggaagcattgtggaattattatttttagggacgggggccggcatgccggcaaagacgagaaacgtaacgtccgtcgcgctgaagcttcttgaagaaaggcgttccgtatggctgtttgattgcggagaagccactcagcatcagatattacatacaacaatcaaaccgaggaaaatagaaaagattttcatcacccaccttcacggcgaccatgtttacggtcttccgggtctgttggggagccgttcatttcagggcggtgaagaagagctgacgatttacgggccaaaaggcattaaagcctttatcgaaacaagcctgaacgtgacggcgactcatctgacgtatcctcttaccgtacatgaaatcgaagaggggacggtttttgaagatgagcacttcattgttaccgcagcatccgtcattcacggtgtggaagcgttcggctaccgggttcaggaaaaggatattcccggcgcattgcaggccggcagattgaaagaaatgaatatcccgcccggacccgtctatcagaaactcaaaaaaggcgaaacggtcacacttgacgatggcagaatcattaatgggcgggattttctggaatccccgaaaaaagggagaatcgtcgctttttccggggatacgagggcatcagagcgggtaacggagcttgcgcgcaatgcggatgtgcttgttcatgaagcgacgtttgccaaggaagatgcaaagctcgcacataattattatcacgcgacgacagaacaggctgcgcaaacggcaaaaaaagcaggcgccaaacagctgatcttaactcatatcagcgcaaggtatcagggtgaatcgccgatagagcgtctcgaacatgaggcgaaagcggtatttgaaaacagtaagatcgcatttgacttcatggaggtcactgtggagcggtcttaaaaaatagacgcttgacatttttttctgatgatatataataaaacgtaataattacgatttaaaaaaggggtgaaaatgatgcgtgtgaatgttacattggcctgtacagagacaggggacagaaattatatcacgacgaagaacaaacggacgaatccggaccggttagaaatgaaaaagtattcaccccggttgaaaaagtatactttgcatcgtgagaccaaatagatcacgataacaaaagccattgtgccgttgcacaatggcttttgttttcatcagtttaccgcctgataggcaggagcattcatttgctggcgcaccgcgcaccaaacatcataaatggcaaggtggacgatgtgcggttcatcgtgatgaatggcatgagaactgtttttggcctgaatccatccgctttgataagagacatcaagcatgcttctgtgcagtttcacccattgttcatgagcgtgctttaagcgctcatcccgctctcccgatgataaaatcaacagcggcatatcgccgaaatgaatctgctgatgctggatctgcctaaggctcgttaaaaattctgcgtgtgatccttccaatttgaactgtttcaaataggcggccttcatttcttcaggaagaagcggaagcactttcgtctcctgatcctcagaaaccggatcaagcagcaccatcccgagaatatcccggcggttccggctcgcccaaagtctgctgataatcgtgccgtatgaatgcgagacgacaaggtaaggaggcttgacgccggccttcagaagaagagcgcttaattcctgtaccatatggtccgccgttctcttgtttcggcttcgtccgcttttgccgattccggctctgtcatatgtgaaaaccccaaattcttcatctatgtcagcgagtaatgatgtccatgtttcagaagaagtgccgtagccggcttcaaagacgatcgtcacttcgccggcgcctttacggtgtttcgtataaaacggacacccgtcaatcagatatgtcctttccatccatgctgctttcattggagtcatctcctctaattggttctatagggaagacggagaagcttcggcaatcgtttctcgaaaaataaaaaaagagacagccgggatcgaaaaactccggctgtcacttcatcaccatgctctgtcgtattggaccggtgacggtatttcagtattcagctgcttcgctgcactccttgcaaagtgcggatcgcggagaagttctctcgcgacaaaaataaggtcagcgcggttgttgtgcagaatttcttcggccattgttcccgtcgttatcaaaccgacggcgcctgttgcaatttcggcctgttcacggattttctccgcgaagctcacttggtagccggggaagacgttaatatcagcttgaacgagtgcgcctgagctgcaatcaatgaggtcgactccctgttctttcatccacttcgcaaaaccgatatgatccgcaatgtccagccctttgtctgtataatccgatgcagaaatacggacaaataacgggccgtcccagacttccttgacggcttcaatggtctcgcctaagaagcggtagcgattttcatgtgagcctccgtattcgtctgtacggtgattggacagaggggacaaaaattcgtgcattaagtagccgtgtgcggcatgaagttcaatgatgtcaaagccggcttctttcgcgcgcgccgctgcctgtttgaattcctgaatggtttctttaatttgttctgtcgtcatttcagccggtgttttggactgctcatcgaacggaatggctgacggagcgtaaatgtctccctcaagctcagctttacgtccggcgtgcgcaagctgaatgccgattttagatccttgcgctttcacttgttccgtcagtttggcaaaaccttcgatatgatcatcgctccagatgcccaaatcctgatcggaaatgcgcccctgaggattaacggctgtcgcttccacgataatcaggccgacctgtccgattgcacgcgatatgtagtgcgccatatgaaaaggctgcagttttccgtccttctcatgtgaggaatacatacacatcggtgccataacaatacggtttttgatcgttacatctttaacggtccatggtgtgaataattttctcgccatttatttcgcctcccggaatgtttttcgacattgattataacaactcatgatcattcagtcatataaactgctcacaactgaacagatcgttcttattgttctggacgggcatttttttatacacagcgtggccgtatcttcataacaggcatttacagccgatcatatagcaaatatagatgagaaacgcaccgatgactgcgtggcctcctttgatccagtttgtcaggatgaaaatactgctgatgaagatcactgcgccgaaggcaccgaatattccgtttttttgagcggctctgaaatcgtcggggctcatatttttcagctgcaagtgaatattcagtaacgacatgatcggcagcaatgtgataacgcctgataaaaataagtatttcgacttgcttaaatacgcggcggccaccataacggtgccgccgataaaaaattgaatgagaaaactcatgctgaaacgctcaccttctgtttgttatcaagtataatgatggagacattgccattttatttttgattgatgtataagtaaactaaatataactaatgcattggataataaagaatgatatctgggagatgaagccgattggatttaaagaagcatttagcctttattaaaacggtagaaagcggcagcctgacccaagccgctgccatattgaattacacacagccgaacatcagccaaatgatcagtaaattagaggaagagtacggttttccgcttttgatcagacagcggcatggagtgaggcccaccgcaaatggcttgaaagtgttacatattatgaaggaaattcaaaaaaactatgaaaaactgtctcaaaccgttgataatattaatgggttagaaagaggggaagtccggctcggcactgttacgagcgtggcggtaaaatggctgccgaaaattttgagggaatttaatgagctgtatccttctattaaggtgcatttatttgatggaaattctactgagctggaacaatggctgaaagatgaccggattgatgcggcgattgggacatcccacagcgagaagtggcatttttacccgttggccgaggacccgattgtagcggtgatgagcccgcagcatgaattggcgcaatatgaaacggttccgttacatgtcatggagtccgtcaaatgtatcgtgccttatccggagacacattttgatgtgctgaaagtgttaaaggaagaaaagatcactccgcgggttgcttatcaaatcagaggggatgaagcgattattgcaatggtgcggaataatctggggatcagcatcttgccgcagcttttggtgaatgatggtgatgtgctcatcaaacggttcgaccggtatgtctccaggcagctcggcattttgacagctcgtgcaaaggagacgcagacaccttctgtccagaaactgattcaatgcatacaagaatgggttgcggtccatcaggcttctgcctgaagaagcctgatatgcgtttaagccggttcaggataatagaccagcaataaatatgtcatcggttccgaggaatgaaaataactgtgcggcatcgcccgaagtcagcacatgcttttcgtcatgaagctcaaccgtcaattcaccgctcttgattaaaatgattcccctaaatgtgattttgtctcataggcgcagcccggcttcaggtcaactatgccttgaaaacaaaaatttgaccgtgacggtggtgagcggggttattttgatgtcgggctttcgtctgtttatataaaaagggcatcaacggcacatgctgttgatgctttttttgaaatgctagggtttggagagcacttcaattccgacgttgaccattttgtccagccccataaaagacaggcagattttggcgcgtctttttcttttatcgatttttttaataatgccttccattcctttaagaggccctgaggcaacggttacttttgaattttcaatatagacttttgaataatctacagtgtctccttctccgatcagcctgataatagggaggatttcttcatccttaattgtcgtgaaataggttttgcgctctttggaataatatgctccgttattcacgattctgcatgaaatggggagttctttgattttatgaaatgtccgctctgtcatctttgttttaaacagaacatatcccggaaacatctttttgagtgcctcgtatttaattccggcttttcgttctgtgacttttttcttgggtatgattgagtagagagcctgctcatcaaactgcagacgcagaaatttttgaactgcttcttcttttcccgactctacaaaaagtgcgtaccatttcatgactggatcctccttagaataataagaaattattatacaaagaaagtatttaatggatagtatttaaagtgattaaaaatttttctaattcgtcttttttttacataatatatgaaaatgaaaaataagtatagacccaattgacagagaggcgatgaattttctttgacatgaaaagggttcagggaattatctgacatttatcccgaaacaattatgccgactgtccaccgaatataaaactgtggaataaatgtcagaaaataacgaaataaagccttgacattattatctataaattgatattattctctttaaatagcaactatttgttaaatttattaaattaaagtaaagcacctattaaatttcaatcgctgtttcggcacgttgaagaggaaatagggattataaaaatgattgcagtgtatatatctacatatacatgataagggagaagtgtgccgtcatggctgttttcgggcatattggcactgcagcttgtcatgcgaaacattcagtaaacaagcaagatgttttaatataaattatgttagaaaaggaaaacacaatgcgtttgcgatttttaaacctgtgctgaatcgcaaacgcgtttgtgtttttatttttatggcggtgtttacaccagtcaatatatgaaataagagacgtttttgtatggagaaccacatgtgatgtacaaaattggcgatggggaaaggatgaggataagatgcttacgtttgtgttcccggggcagggttctcaatttaaaggaatgggagccgggctgtttgatgaatttcaagatctgacacgtcaggctgatgacatattaggctactctatagaagaattgtgcctggaggatccgaatcatcagctggggaaaacgcaatttacccagccggcgttatatacggtaagtgcactcagttatttaaagaagattaaagagtccggcagagagcccgattacgccgcagggcacagtttaggagaatataatgcgttatttgcggccggctgctttgattttaagaccggtttgcagcttgtgaaaaaaagaggggagctcatgagcaaggcagctcccggaggcatggcggcggttttggggtttacggctgaacaagtaaaagaggttctatccgattatcatctgaccggcattgatatcgctaaccacaattcaccttcgcaaattgtgatcgccggaacgaaacaagacattcaaaaagcgggccccgcctttgaaaaagccggcgtgagaatgtatcttcctttaaatgtgagcggcgccttccattcccgctatatgaaagatgctgaaaaagagttcgcggattatttagaagaaacggcgtttttgcctcttcgttttccggtgatctcaaatcttcatgccgcaccttataagaatgatgaaatcaaaacaaatctgactttgcaaatgaccaatcaggtaaagtggacggacacgatacgccgtctgataggacttgaaaataatgaaattgcagaagtcgggcccggggaagtgctgacaaaactgacgaggcagattaaaaaagatgccgtcccattacctatgccgaaagaagagtctgatactgctgatgttaaagcatcggcagctgattcccaaaaaacggcgggaatgagattagggaacgaagattttaaaaaagattataacatccaatatgcttacatgacgggctccatgtacaggggaattgcttcggaacagatggtcattaaagcggcaaaagcgggaatgctgggctttttcggaacgggcggattgagtatcgaacggatcggacaggccatcggaaccatccggtctgcactgcggcaaggggaaacattcggaatgaatcttcttcatcatatgatgtcacctgacaaggaagtcagaatgatagatttatatttaaaaaacggcattcaccttattgaagcatcggcatttatgggcataaccccggctctcgtgatatacagggcaaagggattaagcaggaatcatgacggatcggtgtcagtccaaaacagaatcatcgcgaaagtatcccggcctgaagtcgctgaggcctttctgaatccggctccggctcatgtgctggaaagacttgtgtctgacaatcggctgacagccggggaagcggcgcttgcaaaagaaattccgatggctgatgacatttgcgttgaagcggattcaggagggcataccgaccaagggattccgtatacattaatgcctgccatgatcagactcagagaccgcatgatggagaagcacggttatgcgaaaaaagtaagaatcggcgcagcgggcggcatcggcactccggaagcggctgctgccgcgtttctgctcggcgccgaatttatcggaaccggttctattaatcaatgcacggtcgaagccgggacaagtgattcagtgaaagatctgcttcaggaagcgaacgtgcaggatacgtcatacgctcccgcgggagatatgtttgaagcgggagcaagggtgcaggtgctgaaaaaaggcctgtttttcccggcaagagccaataaactctttgacttgtacagacaatacaattctttagatgaaatagatgaaaaaacgaaaacattaattgaagataagtatttccagcgcagttttgaggaagtgtatgagcagttgaaacgtgataaatctcctgaacagatcgccaaagccgaacagaatccgaaacacaaaatggcgatggtatttaaatggtatttttcccatacgacgaggctcgctctggaaggaaaaagcgaaagtaaaatagattaccaaattcattgcggccctgcgctcggcgcgtttaatcaatgggtgaaaggaacccctcttgaaaattggagaaacaggcatgtcgacttgatcggcaaacagctcatggaagaaacagccggccttcttgcgcaaaggctggtatcgattacaggctgagtatgaccagacattacattttttctgcggaggactaccatgctgattgaaaatcatgaattaacgatgagccatgtcggattagggaatttgaatgagtacgcgctgctgctgttattcggcaatgcacacagtcaccatttaacggacggaacgggattccggcctgatcagatggccgatcaccaagggctgattttgtatccggcttattttatgacacatctcaaagttccttcagataagcctcttgatcagtaccgattatgggacgaggtttccgtcggagtcgatatctcccggtttggagaaaccatattagaatctgattatttgttcgggccgaaaggagcggtcagctctgataaaagcgagtgggaccggggacggtttccttctatgaaagccaatagtttaattgtcgttgacgtcacacaaacagaaggttcgacgcgcaaagtctcagcgccgaaggctgaatgtattgcggaactttctaagctagccaagccgccttacgcgctgatgcggtcaaagaaagtcagaacggacgctttcggtatgaagccgggaaacctcaaaacagcggaccccgtttcatatcgggttcctgttgatcaggatgctgcgccggggcatgccatggtgtttgcgaaattcagcaagataatggatgcggcggaatttgaatggatgacgcgccggtcgaagccgggttttccggtttcaatcgcgcggcatttatttttgcttgaaagagagacgtattattacggaaattgttttgcagatgaagagcttgatatttatatgacgggacacattgaagaatgcgatcccgactttcacggtgagtccctcggtatgatctcagtggcgaaaatcagctatcagattgaagtctatatgaaaaggaatcatacattgctggccatttccaaggtggataagctgctggcggtgccgacctcttcacaagatcatattccggattataaacgggtcatcagaagtttataaaatgaagaatggagctgaaagcaaatggaacaaaccaaggaaatgaagcagatcatcgctcaaattattcaggatattcaagaacagcagtcatatcgggccgtcgaagcgggagatgatgtgagagtcatagaggatctgggcttctcatcactggatatcgctcaattagtcgcacagatggagatggaaaccggagtggatcctttttcccaaggagaaacgatttccagcattacaaccgtcggcagcatttgtgatatttatcaaaaatacatggacagtgctcaatcatgaaaacagaaagcaggggagatatcagctgggtgactgataagcttagggaaacgcaggacagtgagtttctcatttttaaagggcagacttttacgtatgatgatttgctgacacgaatcagcttttttcagaaagaacttgaacaaaacggaatacgtgaaggagaatgtgtggcgcttatcggggattattccccgaacgccatttttttgctgatggcgcttttgttaaaccgaaatatcgttgtccctctcagcaatgaatcaagggaaaagcatctcgatatgtttgaagacgcgaaagtgaatcaaatcattgaaataaatgaaaatgacagctggacgcttcgtgaaggttctgaaagcgcctctcaccctctgcttgatgacctgcgcgagaaaggggagtcaggcattattattttcacatcgggaacctccggcaaaagcaaagcatccgtgttaagcgccggccggctgcttgaaaaatacaaaacggcgaagagaaaaccgctgcgtacgctcatttttctgaaattggatcatataggcggcattaatacgctgtttgcgattctgtttaacgggggaacgatcgtcacatcagacagcagaacgccggagtccgtttatcaggcggtcgacaaatatgctgtccaagtgctccccgccacccctacttttttaaacatgctgctgatgtccaaggcggatgccggctataacctgtcttcactccagctgatcacttacggcacagaaccgatgccccaatcaacgctgcgcggcattcaccggctgtttccggatgtacggctgaaacaaacatacggattaactgaactgggtatattctcaacgaaatcaaaagacagccaatccacttggatgaaagtaggcggtgccggaacagagaccaaaattaccggaggcacgctttgggtccgttctgagtcggcgatgctcggctatttaaacgcaccctcacctttcgatgaagacggctggtacgacaccggtgaccaggtggaaacagacggcgaatatataagaattctcggaagaaagagtgaaatcattaatgtgggcggagagaaagtgtttccggcagaggtggaaagcgtctttctggagatacctaatgtccgggatgttctcataacgggccgaaaaaatccgattacaggcgagattgtcgcggcagaggccgtacttgaaaaagaggaagatatcaaatctttcagaaagcgggccgtagctcattgcagacagaagctgcagccatatcagataccgcagatcatctctgttacagatcggaaactgtctaatgaccgatttaaaaaaataagaaacgtataaaacaggaggcaaatatgaataacggaaaagtagcggtcgtcagcggaggtagccgggggctcggaaaagcgattgtacaggcgcttttggatgagaattacaaagtagccgctttcagccgcagtgaatctgattttattaacacattgagagagagtgaaaagtaccgtgaccgcttttattgggaagcggcggatgcggcggatgatgccgccatgaaacagtttgttcttcaagtgtaccgcaagttttccagaatagacggcttggtcaataacgccggtttgaaccttgatcagctgctgcccctgaccaatgatgaagacattgaccgcatcctcaatctgaatatcggttcagtcatcaagctgacccgaaacgtttcccgggtcatgctgaaacaaaattccggatcaatcgttaacataagctccattatcggttcaagaggatttaaaggcacttcagtctacagcgcatccaaagcggctcttgacggcttgacgcgaagcctggccagggagctcgggtccaaaggaatccgtgtcaattcacttgcgcccggttttgtggacaccgatatgacgaaaaatatgccggaaaaacaaaaatcgcagattatcagaaggacgccgatggggcgtttaggcgaaacagacgatatgaccggactcgttcgttttctgctttctcctgaatcgtcctttatgaccggacagacaatggcaatagacggcggattaacttgttaaagcacagaaaaattcttttgtacaagggatggtatcctcatgaaatgtattaacgaatttttaagaacggtaatagcggaaaagctgggtgccgaggtgaccgaagcagaagataaaaccgctttttttactcttggcgtgacgtctctcatcagtgaagaaatcatgaccatattgcataaagaatttaccggcctttctgaaacgctgctgtttgaatatccgaacattgagaaattgagtgagtttttaagtgcgcagaaacgaaatcccgaaagcgttcttgaattcaaagaaacggagcctgatacgggaagccggcaggaagaagaagtgcttcctgtacaggcggctgaaaaggtgcctgaaccgggaacggacaggagttctgatattgcggttatcggaatgagcgggatgtttccgaaagcggaaaaccagcatgatttttgggacaatttaatggaaaataaagattgtgtctccgaaatccctgaggacagatgggacagctcttattactcggaagagaaaacggcaaaatacgcgtcatacagtaaatggggaggttttattgatcgtccggatcgatttgacccgctgtttttttctgtttccccgtgggaagctgatttaatggaccctcagcaaaaattgtatgtcacgtgctgctgggaagcgatggaggatgccggttacgggaacccggcggcgaggccgacggatcaaatcggtgtattcgccggagtgacctggaatgaatattcattaattgcacacgaagaaggtttcctcaaagatcagtataaaggccccggctccttatattggggcattccgaaccgggtttcttattttcttgatctccatgggccgagcatcgctgttgatacggcgtgttcttcatcgcttgtcgccgtccatcaggcttgtcaggccattatgtcgggcgactgtgaaatggcgcttgccggaggcgtcaacctcagcttacatccgcaaaaatacatgtttttaagccaatcgcattttctgtcttctgaaggaaaatgccgcagcttcggtgaaggcggagacggttacgtgcccggtgaaggcgcgggagccgttttgttaaaaccattgaaaaaagcgattgcggacaacgaccacatctacggtgtcattaaggggtccgccactaatcacggcggcaaaacgaccgggtatacggtgccgaatccggaagcgcaccgggacctgattttatccgctataaacagagccgcggtaagtccggcggatatcagctacattgaagctcacggtaccggcacggcactcggcgatccgattgagatacgcggtctgtctatggcatttgagaaacagaccgatgagaaaaatgactgcggaatcggctcggtgaaatccaatatcggacatttggaagcggctgcagggatcgccggtttaatcaaggtgcttttaagcatgaaacatgaaacgcttcccgccagtctgcacgccgaggaactgaaccgcaagatttctttttctgattcgccattttatgtcgtccgaaacaatcggccgtggccggctgaaggagataaaccgagaatcgccgcaatcagttcattcggcgcaggaggctctaatgcccatctgatcgtaggtgcttatcagccaaaacggcaagcggacgggaatactgagcaaaaaccgcatgccgtcgtactaagcgcacattccgaacagcagctgaaagaatatgccggaaaattgagctcctttcttgcccgattggaaaactcgccttctgccggcggatacagcctggaaaatatcgctgccaccctattgtcaggcagagagcctttctccttccggcttgctgtcattgcgtcatcccttcccgagctgaaacagcgattggacggctttgtgagcgggcacagcggcggcaggcatatttacttcggaaaagcgtcacccggacggccggacgtttcaggccaatccgtttcagatcctgaaaaatttgccgcgctgtgggtcaaaggccttcaaggtttcaaaaagccggagacgccgtatcagaaagttccgcttcctacgtatccgtttttaaaggaaacgtcctggctgaccgaccaaaaaaagcggtatacgaaaaagccccaatctgtcaaaaggcgtgaagcgctgcatccgctgcttgatgagaatgtttcatccgcccggaaagggacgtttcaaaagatattttccaaggatgaatatttctttaaagatcatttagtgaacgaaaaatatgtgctccccggagtctgtcatcttgaaatggcggcatacggcgcggcattgtggggagaacgcccggtcgtctctcttcaaaatgtgtggtatatggagccgattgtgacagggacagacccaagatccgtcatgatagagtttgaagcggaaaaagagcgtataagctatgtcattaaggaaaaaggagcggacggcactctcttttcgcaaggagaagtgatttgtaaagaaaatggagcgtcgtttgaggccccggtctttcagcttccggcgccatttacgcagagaacggagccgaaagacatctatcactcgttctctgaggcgggaatcgtgcaaaaggacagttttcaggtcatccgcgaattctcttatacagaaaggaaagcactggccaaattaacgctcccgtcacacttggaagcggattttaaacagtacatcctgcatccgtccttactggatggcgctgttcaaactgcaatggcgcatgtgctgcaatttcaaaaagagcctgcgcttatcgtaccgttttccttcggagaaatacagctgcttaaaccgttagcgaaaaccgtatttgtgcatgcggaggtaaaagcggcctccgttcaccaatttgatctgcatatttgtgatgagcgcggtgtgctgctggcggcagtgaaagattttatcataaaagaggtgcaggaaagcgccgggtttaaccaaaaagccggcgtcatgccgaagaaaagccgtgaaacggaattgcttatgacaccggtttggaacaccgtcaccattccggaaaccggcatgtctttcatgcgtgaagaaaaaataatcgtcatcgggggcgggccggattttcagcaggctttgaaagagatgtattccgatgtccgttttccggacatcacttctttggacagcgcggaacaaatagctgaaacactgaaagcgcaaggctcttttcaacacatgatatgggcggcgccggatcatccgattccatccgtttatgatgcggatacggccgacggacaggagcacggggtcatgcagcttttccggctggtaaaatcgcttctgcttctgaattttgacacggaacaactatcattgacaatctgcacgtttcaagcacagccgattcatgaacatgatgaggtcaatccgagtcatgcaagcatacacggattagcgggggcgctcgcaaaagaatacagcaattggagcatccggcttcttgatttggaatctcaaaggggagaccggcatcttcccgatatcttctctttaccggcggaccccgagggaaatccgtgggtctttcgtgcaggtcagtggcaccgccagcaattggccgtctgccagcctcatgcaggtgagccttcattataccggcacggcggggtttatgtgattatcggcggagcaggcggaataggagaagtatggactgaatatatgattcagacctatcaggcgaaaattgtctggatcgggagacggaaaaaagatacacagattgaaagaaagctgaaaagacttgcggctttaggtcccgcaccgcaatatttcagcgcggatgctgcggattatgattctctcaagcgggcgtatgacaccattgtgaaggaacatggaaaggtgcgcggaatcattcattccgccatcgtgttatcagaccggagttttgccaatatggaagaggaccagttccgcgcttcactttctgcaaaaactgatgtcagcttgcagattgcccgggtagctgaaggggaaccgctggatttcttgctgtttttctcttcgatgatgtcgtttcaaaaagcgccgggacagagcaattatgccgccgggtgcacgtttaaagacgcttttgctaagcggatctcacaaaaagcgccgtatgccgtaaaggttgtcaattggggcttttggggaagtgtcggcgttgtcgcttcagaacaataccggaaacggatggagcgggacggaatcgcttctattgaggcgcccgaagcgatgaaaacgctggaaaccctgctttcgggaccttatgaccagctggcgctgatcaaaacgacagatccggtttttatgaaagatgatctgaaagaacaagtaacggtttatccggaaaagattccttccgcactcggacaattagcggttaacatcacgcagaatgacgaagctgagcgggtaaaagcatcaaatgtcatgagctgcatgagagagatggaatccctcattgaaaaaatacttgtatcaaccctttatgagatgggcgcaaggcttgatgagactttgccgttatttcaatcggctgccggcataacggaacaatacagcagatggctgaaagagagctttgtcttcctgactgaattagcgcttgctccggaaaaaacggatctaggggaggtgtgggaggaatgggagcggaaaaaagagacttggctgcgccggaaagacatgagggcgcatgtcagattggcagaagagacattgcgtgtgcttccagacattttaaccggtaagcttccggcaacggaagtgatgttccctgactcctccttccgtcttgtggaaggcatttaccgcaataatatcatttctgattttttcaatgacaagcttgctgacacattgattgcagttttgcgggagcgtctggaaaaagacccgcaggcgaaaatccgcattttagaaatcggagccggaacgggcgggacgagcgccgcggtcatgagaaaattgaaaccgtatgaagcgcatattgccgaatattgtttcacagatatttctaaagtatttcttttacatgcagaagacatattcggtccggaatatccttatgtcacttataaaatattcaacgctgagcagccggtatcaacagaagcgccggacatcggcacgtatgacgcagtgatcgcgaccaatgtgcttcatgcgacaaaaaatatccgctctacgctgcgccatgcgaaagcaatgctgcaaaaaaacggccagctgtttataaatgagatcaacagccgcaccgtattcaaccatgtgacgttcggccttcttgaaggctggtggctgtatgaggatcatgatttacggattccgggctgtccgggggttgagccggccggctggtcggaagcgctttcacttgaagggttcgtccatcctctgtttccggctgaagccgcacacgacttaggccagcagattatagcggctgaaagtgacggaacggtcaggcttgccctcccgcaggcgtcagaagaaaaaccggagcgccgtccgtatgacgcagatggtctttcggatgatacattgcatttcagcttgagagaaaaaagcgttgaactgatgaagaaggtaatcggtgaagcgcttaaagtgccggcgcatcgtcttttatcccatgaacctttaaccgcatacggattggattccatactggtcgtcagactgaccaacgcgttaaaagacgtcttcggttctgtcagcagcactttgttttttgaatatcaaaccattgatgagcttgctgattactttctgtcttcccgtaaagaagcgctcgagcggcaattcgggaatggacgggctcattccgaaaacgccggacggatgcaggctcccgcagaaagcgccgcgccgattccaaacgtaagggaacggggcatcacatatctgacggaattaataggaaaaacgctaaagattccgagcaggagaatggatccgtcggtttccttaaccgcatacggtttggattctattctggtcgtcaggctcacaaatgcttttcgtaacgtgtttgaccaaatgaccagcaccctcttttttgaatatcagacgatagaagaaatcgcggattacctgcttctttctcagcggagagcatttatgaaagcgatgggtgtgcgtgaggagcagctgtctgatcacacagataacctgaatgtaattcctcaaaacgaggaagaaagcaggacaaacggagatccctatatccaggatatcgctgtcatcggtctgtcaggccggtatccgggcgccgatcacgttgatgagctgtgggaaaatgtaaaagccggcaggcattctattacagaagtgccgaaagatcgctgggactggaaaacgttttataacgaggaacgcggaaaatgggggtccatttattcaaaatggggcggtttcctcgatgacattgataaatttgatccgctgtttttccgtatatctcccgcggaagctgaaaggatggatccgcaggaaaggttgtttctgcagactgcttattcaagcattgaagatgcggggtacaccccggccacgctttgtgacagccggaaaatcggagtctttgtcggtgtgatgaacagcaattacccgacagttcccagcgactggtctatcgcaaacagagtatcgtttttgttcaattttcaagggccgagtatggctgtggatacagcctgttcttcttctttaacagctgtccatctcgctgcagaaagcctgcggagcggaatgagtgaaacagcgattgccggcggagtcaatcttatcgttgatccggctcactatgagcggctgtccgctttttcaatgctgtctcccggtgataaatgcaaatctttcggagacagggcggacggttttgttgacggtgaaggagtaggggcgattgtgttaaagccgcttgctcaagcggagaaagacggcgatcatatttacggcgttatcaaaggaagcatgctgaacgcagcaggcaggacaaacgcttatatggtgccgaatccgaaagcgcagtttgatctgatcgcagagacgttgaaacggacagacattcacccgagaacggtcagttacttggaagcccacggaacgggcactgcgctcggtgatccgattgaaatcgacgggttaacgaaagcttttcgcctgacaacagaagaccggcagttttgttccatcggttcaattaaatcaaatatcggacatttagaaagcgctgccgggattgcgggaatcaccaaactgcttctccaattgaaacataagaggattgccccttcattgcatgcggcggaattgaatccgaatattgagtttgagcacactccgtttttcgtacagcaaaaagaaacggaatggaaacgacctgtcttgaatatcacgggtgaaatgaaggaatatccgagaattgccggtatttcctcttttggagcaggaggggcaaacgcgcatatcatcattcaggaatatgtgccgtctgacagcctgaaaccaagggaaaacgcgtctgtttctccgcaaaaaccggctgttattattttatcagcgcgaaatgagcagcaattgacagagcgcgcccgccagcttctggatgatgtcataagaaaaaaacgttctgacggggatttggccaaaatcgcttacacgcttcaggcgggaagagaaccgatggctgagcggcttgcatttacggccgagtcgatagaagaactgaaaatgaagcttatgagtttctcaaacgatcatatcgaacatgctcatatctggcggggcaggacagccaaacatcattcattggcggcttcgctcacttctgatgaagatatggcgcttaccataaatgcctggctgaaaaaagggaaatacggaaagctgcttgacctttgggttaaaggacttgacgtcgattggtcagctctttatcagcgcaacccgggccgcatcagtctcccggcttatccttttgccaaagaccgatattgggtcacaaaagctgatgtgtcacttgacaaaacaggctcagcggaaagtgagaaagcagccagacttcacccgctgctccacgcgaatacatcgacctttaccgcccagcgctttacttctgttttttcagggcgtgaaccgttttttgccgatcacatcgtcaatggaaaaccggtgcttccgggcgcggctgctttagaaatggcccgggccgccgttacacttgccgctgagggcttgccgggcgggaaagcgggtgtccggctcaaacagatcgtttggctccgtccggtgacggcgctttctgaaggcgtgacgcttcatgtaaagcttcagccggaagaaaacggagacatcgcttttgaagcgtatgccgaaggagaagagccgcttgtctttttccagggaaaggccgtgctcgaagagacggagcgtgctccggtactcgatgtggaggcggttcaggcgcgctgcggcggccggcgcatgtcaaaggctgagtgctatgaagcattcgacagtctcggcatcacctacggaccgtctcatcaggcgcttgacgccgtctatgccggaagcggagaagtgctcgcgaagctcactcttccgccgtacgcccgcgaagaaaaggagccgttcatcctgcatccgagcatgctggacgccgccctccaggcttctatcggtctcgtgcactcagacggttccgcgtccggacggccgtttctgccgtttgccctccaagatatgcaggtgttttctgcgtgccgggagacgatgtgggcggtgctttcctcagcggacggcgcctatcatattgagctgtgtgatgaaaacggcgaggtatgtgtccgattgacggggctcaccgcccgttttctggaagaggaaacggagggaaaaccgctcttgcttcagccaaagtggcaggaatcaccgccgggtgaaggcggcggacaagcagagtctttcagatacgtgacgctgtatggcggaatgaacgctgaggacataaacggcgccgtatgtgcggctgacggggaaggtccgattgaagaccgttatgacgcctgcgcggcggagctgtcagcgatcgtcaagcgtcttatcaaagaaaaacagaagggaaaaacgctgatccagcttcttgtccccgacaggggggaagacaatgtattggcggggctggccgctttcctgaaaacggctcaccttgaacatccgaagctgtacggccaagtcatccaagccgatccggacgagccagcatcatcgcttcttgccaagctgaaagaaaaccggacgcaccctgaacaagcggaaatccgttatcaagccggcaaacgtctcgtcagaaactggcgtcacctgcctgcgcttcaaagcggcgccgttccgtggaaagacgaaggggtttacctcctcaccgggggagcgggcggcatcgggctgattttcgctgaagaaatagcctcccgcgtcaaaaacgccgtcctcatattaacgggaagggcggaagcgcttgataaagaccgctccgcccgcttacggcgcttggaagcgtcgggtgcccgcgtattgtatcaaccggttgatgtgacagacagggcggcggtcatcgccctcgtccgcggcatacaggaggagcacggaacactcgacgggatcattcacggcgccggcgtgatcgccgacaattacattctgaaccagacagaaaacgaacggaagaccgtcatggcgccgaaggtgaaagggcttatcaatcttgatgaagcagcgaaagatgcgcggctggactttttcattctgttttcttccttggcgggaggtatgggaaacccggggcaggccggttatgcggcagccaacgcatttatggacgtatatgcagcccgccgaaatcgtctcgtgcgggacaacaagcggagcgggcagaccctgtccgtcaactggccgctttgggaagaaggcggtatgcgcgtggacaaagagacagaacggctgatgtatgaacagaccggaatgaaagccatgcgatcggcttcaggcatccaggcgctgtacgccgcttttgcctccggagcacaccaggtcatggtggcagaaggcgacgagaaacggattcgaaaaaacctgatgcctgaagcgccggaaccgtcacgcagcattcatgtgtcaaggaagacccacgtccatctgccaaataaagtacaagcggaactcaaacatatgatatcaggcattctgaaggtgaaagaagaagaaatagatgctgaatcagagatgagagattatggatttgattcggtttcattcacgcagtttgcaaatgaactaaataaaatgtatgggcttgaactgacgccggccgtgttttttgaatacccgacagtctttagttttgcccaatacttgctgacggaacatccggatacattcggcccacaggaagaaacagaaacggagaaaccggttgagcgtaaaaaaatgaagacggagccattctcgattccgtcccgccttcctaaaacaaaaaccgcagctgaacctgaagagcccgtggcgataatcggaatcagctgtgcatttccaatggctgaaaatccggaaatgttttgggagaatttagccggagaaaaggactgtatttctgaaataccgccggagcgctgggactggagacagtattacggagatccgcagaaagataaaaatgcgagcaatgtaaagtggggcggcttcattgatgaaaccgctcaatttgatcctttatttttcggtatttctccgcatgaagccgaaatgatggatcctcagcaaagacttttaatgatgcatgtatggaaagcgattgaagatgccggctgctctgcaaaaagcctgtcaggtacaaatacaggcatttttgcaggcacgacaaacagcggttacgctcaggaagcttcaaagttccatatagagattgagggttcttccgctgccggaacggttccgtcaatcggtccgaaccgcatgagctattttctgaatatacatgggccgagcgaaccgattgaaaccgcctgttcaagctcattggtcgctgttcaccgtgcggtcagggcaattcaggccggagactgcggcatcgcgattgcaggaggcgtcaatgctattgtgtcgccggacatgcatatcagctttaataaagcaggaatgctcagtgaagacgggcgctgcaaaacattttccgatcaagcggacggctatgtcagagctgaaggtgccggcatgattgttttgaaaacattatctgatgcggaacgtgacggcgaccgtatttatgccgttatccgcggaacggcggaaaatcatggcggaagggcggcttcccttacatcgccgaatccgaaagcgcagacagaagtcatgataaaagcgtatcagcaagcgaacatcgacccccgtacagtgagttatattgaagcccacggcacgggaacggcgctcggagatccgatagaaatcaacggactcaaagcggcttttgcagcgctttatcaaaaagccggagtaacggcacccgatcagcctcattgcggcctcggttccgtcaaaacgaatatcggccacacagagcttgccgccggcatggccggacttttaaaaattattttgcagatgcagcacaaaacgctcgttaaaagtctgcattgtgaaaccgttaatccgtatatcagcctcgacggcagcccgttttatttcgtccgcgaaactcagccgtggaaagcggcgactgatgatagcggaaatgaactgccgcggagagcgggtgtcagctcgttcggatttggcggtgtcaatgctcatgtcgtgctcgaagaatatgtttctcctgttgaagagaaacaatggacggccggtgaacttcagccgtccttattcattctctcggcaaagacggcggaacagctgaaggaacgtgcggaacagctgcgcagatatttggaaaagtcacattcagctgacggagctcttgcggatatcgcttatacgcttcagcttggccgggatgaaatggaagagcgccttgccgtcattgctgaaacaaaagaagagcttacgaacgcgctgaatgatttcctcagcggcaaggagacggggcagaatttctttacaggccggaacaaagcgatgaaacagctgtttacagagatgacggacaatgcagaaatgagcggggccgtagatcaatggtttgaagcaggaaagtatgcaatgcttgcaaaattatgggtgcaaggcttgcatgttgattggagtaaattgtatcaggacgaaagaccgaaaaaagtcagcctgcctgtctatccttttgcgaaaacacattgctggataccgcacagtgcgcagcatataaggcaccgggagacttacgggactgatacgtccccgcttgagacttatgagcgcctgcttgatgaattggagaaaaacgaaataagcatagaagccgctgtaaaaagaacgatcggtttttacagggattagcgtaatggaggaaaccatatgaaagagtttctgcaccgggttttttctgacgtcaaaaataaaaaaatgacaaaacaggatgcgatcggcattttgcgcgattatgatatgcggatgggacttcgccaaacggattcccttcatccgcttgctcagcagcatatttccgatgaaacgggacagggattctcggcagctttcagcggccgggaattttttctcgctgatgtttctttacagcataaaaagcttatgcctggagaacttcttttggaaatggcgagagctgcggctgttttgacagtaaaggagactgcggctgtccggctgacgcatatcgtgtggtcaaagcccattctgactgaggctgagccgttccatatcgaaatcaggctgatacccgcagagggtgaagccaaaaggtttgagatttataatccattttctgctgattccagtcattatgatgtgtacagccaagggacgattcagccagttgatgctgcgcccggcatgctggatatcagccgcttgaaggaaaacagcggttccctgatggataagcagcaaattgaagccatcactcagaacgataccgttcaatacagtgagcacatgaaaggaattgagcgtatttacgcttcatcaggacggatgctggcagacatatcaattccattgacaaaccaaaaagaatccgcccgattcggcctccctccctgtgtgatgcaaagtgtgacagaggcatgcgcgctgcttggcggcaaagaatataaaacgctcgctccggtttcattggacgagcttttgttttatgaatcttgtcctgacaaggtatgggccgagatacaagagaaggcggggagcttttatattgatttatgtgacggagaaggaaaaatatgggcttctctgtcggggttgaagctgcagcctgtcatcaagacgggcgcttccggaaaaaccaatgccgaacaccgcagtgaacgtttgtatgaacaaacgcttcttcagctcaaaacgctttttggcctgactgcaaaaattgctgtttccaacatagatactgaagagccgctggaaacttacggaatcgactccgtcactgtgacgaaattgaaccgcgaattgtctctgcttttcggtgacctttccaaaacggttttttacgaatataagacactgggctccctggcagctcactttgtcacggattatccgaatgaatgccgaaaatggacaaatgatgatgagcaccgttcaggcatatcagaacaggttttggcaaatgaagattttccggtgcttccgtcgtttatcaagcgaagaaaacggcctgctttttccaatgagaaacagacaaaagaagggattgcgattatcggagtcagcggacgttatccgcaagctgaaacacttgaagagtactgggataacttagcggccggaaaagactgtgtgaccgaaattcccgaagagcgctgggaaaaggacaggtactacaaccctgatcccgaagcggccgtgaaagcagggaaaagttacagtaagcggggcgggtttctgaaagatgccgctttctttgatccgctgttttttcaaatttcaccccgtgatgctttgaatatggacccgcaggagcgtctctttattgaaatgtgctggcaggtgctggaggatgccggttatacgaaggaacagcttgagaatctgtataacggccgggtcggcgtttttgccggcattacgaaaaacgggtacggaatgtactggaaaaacggcggcaccctgcagccgaaaacgtcgttcagttcagcggccaacagagtttcctattttcttaatctgaaagggccgagcatgccggtcgacacgatgtgctcgtcttcgctgactgcaattcatgaagcgtgtgaaaacatccttcgcggcgcatgtgacatggcgattgccggcggtgtgaatgtgtatacgcatccttcggcttatgcggagctcagcgcctatcgaatgctttcaaaagacggaacgtgcaaaagtttcggtgaaggcggggacggatttgttcccggggaaggcgtcgggaccgtgctgttaaagccgctgtcaaaagcgatggctgataaggaccatatttacggggtgattcgcggcactcatatcaatcacggcggcagaacaaacgggtatacagtgccgagtccgagcgcccaggctgacgtgatttccggcgcgcttgaaaaatcaggaatacatccgcggatgatcagctgtatcgaagcccacggcacgggcactgaactcggagatccgatcgaaattgacggtttgacccgcgcatttcaaacgaaaacgtcagataaaggcttttgcgccatcagctcagttaaatccaatatcgggcatttggaagccgcggcaggcattgccggtgtaacaaaactgctgctccagtttcaaaaacgaaagctggccccttcattacattgccgaagcttgaatccgaatattgcatttgaccggacgccgtttgcggtgcagcgtgaattggcagactggaaacggccggtcattgaggaaaacggagcgcagaaagagattccgagaatcgcgggaatctcttcttttggcgcgggcggggcaaatgcccacatattgatagaagaatatattgaacctgatagggagatttctgagccattcacagatgaagatcccgcagtcattttattatccgccaaacaggaggccagcctgaagcagcgggcgcagcagcttcttcaagcgatcagaaaaaatgacgtcacagaccgcagcctccgggatgcggcttacacccttcaaaccggaagagaagcgatggaagaacgtgcggcgtttatcgtgacgtcgacagagcagttagcggaaaaactgcagtgttttattgacggcggaacagacggctgcttcaggggaaaaagcaaacagtataaagatattctagccgtttttaaggatgaagatatgcaggaagccgtccgtaaatggatgaaaagaaaaaaattcgcgaagcttctggaactttgggtaaaagggctgaagattgattggtcagagctttataacggcagcctgccgcatcgcgtcagccttcccggttatccatttataaaggatcgttattggccggacgatgcagcgccggacaatgttcgcggtgctgaaacacattctgaaacatttcgtgaattccgctttttacagaaaagctgggcagaaagcagccgtgttccggctaaggaagtgcggggcgtcatcggaatagccgctgatcaccagacaggaaatttggccgttgagctgtcccgttatttccccgagtctgaaatcattgacgctgcatcaccggaaatatccggggacgcggcccggtttggcggtctgattgatgtgacgggatgcgggacggaaatcaagcatgatgacggctggattcatcgtctgcagtctctcatcgacaacagaaaccgcggccgaaagctacagctgctttgtgtgacaaaggggcttgaaccttttgcgaatgaaacgataaatctctcaggtgcaaaaaaggccggattgtaccggatgctccaaagtgagtataaggatatccgctcgcggcatatggatgcagaacggactgccgaagattccgagctggcaaaccagatcgcagaggagttttttcgcgattctgcagacatcgaagtgtgttaccgaaacggtgtgcgctatcacgcgcggttaaaggaaacaaacagcttagctgaaaaagaattttcatttccgaaagaccatgcgctctggatcaccggagggacccggggactcggatatttattcgcccggcattttgccgaacgttacggagtcacgaaactcgtgcttaccggaaaagaaacaatgcctccgaaagcggagtgggatgatcatatcaaacggaattccccgttttccgataaagtgagaagaatcagagagctcgaacaaaaaggtgtccgaacggaagtgctgtctgtatcttccggccctgaatatgagcaggccgtcagccgggtgaaagagaagatgggaccgattggaggcgtgatacacgcagcgggagccgtagatctcgatcatcccgcctttatccgcaaaacaagagaacagatgatgactgtgcttgaacctaaaactgacggactggaccttttgtatcaagcgctgcacaaggagcctctccggttttttgcgctgttttcttcagtgtccggcgtgatgccggaattaggagcgggacaaagcgattatgccatggctaacgcctatatggattattttgcggccgcaaaaggttttccggtgctgagcatccaatggccgagctggaaagaaacgggtatgggcgaatcaaaaagccgggcctatcagaaaagcggtttaaagagcatcactgacagagatgggctgagcctgtttgatgccgttatggcaggcgattgcggatctgttattatgccggccgtcattcacccggaaaaatgggagcccgaccgtctgatgctttcaaccggccttaccgaaacaaagcagcatgtacagggtgagacagaaagcgtagaggagtggctgacgggcatttgctgccgggaattaagactggagccgtcaagatttgaatctgatacaccgtttcaagattacggagccgattctatcatgcttgcccaagtgtccagagcgatcggaaagaggatcaaagctgaccttgacccggcggtgctgtatgaataccctacggttgctgcgctggcgggatggcttgaaacggcatatccggaaatcaaagctgccgtttcaaaaccggttcagcctgtaatcccggacgttcccaaacaaacagcagccgctgtcattcagccttctggcgctgcagcggcgcaagacatcgctgttgtcggaatgtcctgccgttttcctggagctgaatcaattgaagcttattggaagctgctgtctgaagggtcgtcggctattcaaagggtgccgaaagaacgctggaaaacggagaaggcggattatgcgggccttttaaaaaatgtaacgcattttgacccggagtttttccttattcccgaagaagacatcaaggcaatggatatccagtcctttcttatattagaagaggcgcttcatctgttcagagacagcggttactctttacaagaaatgaaaggcaggtcagccggtgtctatttaggaggacgcggcggcagtatgcctgacgaaaaccgtctgaagcatgcaaaaaatccgatagtcgccgccggcccgaattacttggcggccaatctttctcagttctttgatttgaaggggccgagtctcgttttggatacggcctgttcttcagcgcttgtcggtatgaatatggcgatacaggcgctttcttgcggtgaaatcgactcagcggtggtcgggggagtcagtctgctggaatccggtcaaacccaccggatgttcgaacttcgcaatctgttaagcgaagagcctgcgtttcatatttttgaccgccgcaccggaggcatcgtattgggagaaggcgtcggaatggtgtatttaaaaacagcggcccaggctgtaaaagacggggaccggattcatgcggtcattaaaggcatttccgtaaacaatgacggcagaaccgcggggcctgccacaccgaatatacaggcgcagaaagaagtgatggccaaggcgcttgccaaaagcggcagaaaagcggaggatatcagctacattgaagcaaacggttcaggctctgaagtaaccgaccttttggaactgagggcgattgaagcggtgtaccgtatgcaaaacagcgcgccttgcgaattggggtcgatgaagccgaatatcggacacccgttatgcgctgaagggattgccggattcattaaaacagtgcttatgctctcgcgccgaatgcgtgtgcctttcctttcgggcaaagagccgatgacgcattacgatctgtccgcctcgccgttttatttttcgcacgttctgcgtgaatggacggattcaccgcggattgccgccgtcagcagtttcgctgacggagggacgaatgcccatgtcatagtggaagcctgggagcaggaggcgtataccccggttagaaagcctttgccgagacaggaattaaaacgccggcccatccgtccggacaaagctgaaaacctgcatgaaaacgcacatgaatcccgcccgaatacgttttggaaacaaatgaagacttactgattgcgctgaaaattgaacgtcgatatggaggaagttcatatgcaagagcagcttcttattaacaatcagcatcccgttctgaaacatcataaagcctatggaaaggaactgctgccgggtctggcttatattgacctgatctatcagactttcagagaaaacggtttttttcatgccggccttgaactcaggcacttatcgatttttcaccctttagctcctgaacagggagaaacaatcctgctttccgttgactgtacagagaacggcgaagggcagtggaaggtagaggtgaaagggcaaaaacaaggtgacgaagcagcagagacaaagatatatgccgcggcgcaaatgcattccgtcaagcccgccggcttccaagagagcgtccggatggatgccgtaaaacaaacggcggcagaaataccgcttgaggatatttacgcggaatgcagggatcaagaactggttcattcaggaatgatgaaaggctgcggaagcgtctaccagactgaaaaagagatttatattgatctgtcggtgcaaaaggatcagctggaacatgcagaagaggcgatgtttcatcccgcattgatagatgcgagcagcatcggctccaatgtatatctcgctcctttgacgagggaggaggggcaattatttctgccgctgttttatgaatcattttattgcgccgaattgctgcagacgacatgtatcaccaagataaaaaaagaatccgtcacacgtaagaaagatctcgtttacgtgacaatggagtttttcaatgaggaaggcagaaaagtcggcgaactgaaaaacttcgccaataaacgggtgagggacccggaactgatcaatcagaaacggcaaaagaaagaacctgacgggcggaatgccgtcccggctccgcaagcggaaccggcgccttccgagccccgccgtgcggaggcttccgccggccttactgaacagtgcatcctttatttaaaagaattgcttgccgcccgattgaacaaacctgtgaaagagattgacccggatatcggctactatgaaatggggctggattctccggggctgttggacatggtaaaggaaattgaacgaaaaatcggaacgcagcttctgccgacgctgttatttgaatacacgacaatcgcggaattggcgggatatttgcgcgaacattacggagccggcttcggccatgctcaaagcgggcatccaaatgctgaacctttgcgccgggaaaaaaagaggacgacccaaaaccgcgtgaaaaaatcggcgtcagccggaacgcagaatggagatattgcgatcgtcgggatggcgggacggtaccccggcgccaaaaatcttcgtgaattctgggcaaatttaaaaaatggagaaaacagcgtaacggaagtgcctcgttcccgctgggatacgaggaaatatgagcatttgcgatcgccgtccggcaagccgatttccaaatggggcggttttatagacgatccggattgttttgatgcgaaatttttccggatttctccgcgggaggcagaagctaaagatccgcaagaacgattgtttttagaaacatgctgggaaacgattgaggatgcaggctataccccggaaacaatcgttcagccgaaagggccgaataagagaatgaacgtcggtgtgtttgccggggtgatgcatatggattattctctcgccggcgctgaagctgcggccaaagggctggtctttccttatcccttgaactatgcgccgatcgcaaaccgggtttcatatttctgcaattttcacgggccgagcatggcggttgacacggtgtgttcgtcatctctgacggccgtccatatggcggcggaaagtctgagacgcggtgaatgtgaagcagctcttgccggaggcgtcaatttatcattgcacccgacaaaatatatcacatacggcttgatggatatgcattcgagtgacgggctgtgccgcacgttcggcgaaggcggcacaggctatgtctcagctgacggcatcggggccgtgctgctgaagccgcttcacaaagccgaagaagataaggatcatatttatgcggtgataaaaggcagcgccgtcaatcacgtgggaaccgtcagcgggattaccgtgccgagcccagtggcgcagggggatatgatagctgaatgtcttgaaaagacggggatcgatcccaggacgatttcttatgtggaagcgcatggaaccggaacttctttaggagatccgattgaaatacaaggtcttgttaaagcttaccgcacgtttacggaggatcggcaattttgtgcgatcggttccgttaaatcgaatatcggacatgcggagtcagccgccggaatcagcgggcttcataaaacggttttgcagctgtttcacaaaacgcttgtcccttctttgcactcagagacgattaatccgtatctccgtttagaggactcgccattttacgtgcagcaaaaaaccgagtcatggaaaaagccggcgtatacagagaacggcagagaacattcctgtccgagacgcgcaggcatcagttcattcggggcgacgggttcaaacgttcatctcattttagaagagtacaggcccaaaaaccccggcattacggagaatcaagagagaccgtatatcgtgcctctatcagcgaaaaatccggagcggctgaaggaatacgctgcccgcctgctgatgtttctcaaagataaagcgcttgaaggaagcgggtcgctttatgacaaaacagatacaatgcaaaatcagctggaaaatgcgctgcgcggtgctctggcggaagttctgcatgtagaggccggctcggtagatggtgaacaggattggaaggaattcggcttggatgtcatgcagctgacacagttttctgagcggctgacggatcaatacgggctggcaatagacatgactgatctcatacagcatacttccgtccggactttagcagaatgtctgacaaacgatgagaaacataagaatattctttccggtcttttcggtcagtccggcttagagaagcagtctgatgaacctttttccctgcggtcactggcgtatacgctgcaaacgggacggctggcaatggaagaacggcttgtttttttagtgaacgatcaagcggacctgatcaggaaattaaccgaatttacagaacgaaaacggcagattgacggctgctttcaaggccggtctgatagcggaacggaaatcaggggtttcctgaatgatgatcaggatacggaggagctgatccgaaaatggacggacagcggcacttacaaaaaacttgcggagctgtggtcaaaaggatttgagatagactggacgcggctgtatcgggaggagaaaccgcgcaggatgagtctgccgacatatccgtttgcgaaggagcgctattggataccggagcccgatcatcccgtcacttccgtaaatacagaaagcaggcttcacccgctgcttcaccgcaatacatcagatttgttagaacaaaaattcagcacggtactgaacggagatgaattcttcttagccgatcatatcgtccgaaacaagcgtgttctccccggggcggcttatcttgaaatggcgagagccgcggctgaactggctgccgcgccgttagccgctgaatacacggctaaaaccggcatttcgctgcggtatatcagctggatacgccaggccgttcataaaaaagagccgctgcgtatgacgacaggtctttccttagaggataacggcaatatttcatttcaagtgtacagcaatgaaaacgattcagacatttattgtgaaggcagtgctgtgattgagccgctgtctgaggcggcggttttgcatattgaacagctgaaagcgcgctgccgcaaaaaagtgctgtcaaaagaagactgctatgcggcatttgcaaaggcggaaattgtatacggaccttcacatcaaggaattgatcacatttattgcggggaaaaagaagccttggctaaattggtgctccctgcttccgtttgtgatgaggccgaacagtttgtgctccatccgagtctgattgattccgcttttcaggcggccatcggcgttatgaatgaagataaagcgggttatccggagcagccgttaatgccttttgaattgcatgaactgaccgtttttcatccgtgcagtccaaacatgtgggcggccgtatttgtgacgcatgaaacacgggccgtgcgaagaatggacattgatatatgtgatgaacgcggcaatgtgtgtgtaagaataaaaggattttctgcccggatggccgaaagtgcgccggccgtaaccgataataagcaatacgatctgccgggtaaccttaccggagccgtcaaactgatgcaggtatgggacgcggaaccgatagacaaccaaaccggcttccccatttctgaagcaaaagctgtcatcataggcggtacagacgggcaggcggacgcggttttacgattgtttcctaaagctgtgcgatttgatagcagccaaagtgcttccgttgaagtgatatccgatcggctccgccgtgtcggtgagattcagcatatgatctggtttgcccctcagccggctgattcttacatccatgatcaaaaaagcggggtgctgcaaattttcagagcggccaaagctcttatcggtctcgggtatggaaaagagcagctcgggatgacggtgattacgcaccaagcacagcctatcacccaatatgatgaggtgcgtcccgctcattccagtgtgcacggtttcgtcgggtctctcgcaaaagaacatccgagctggcacatccgtctggtcgatcttgaagacggggggatttccctgcagaagacatattcagcctgccccgcgaccgtacgggtaaagcatgggtgcgcagacatcaggaatggcaccggcctcaattgcttccggtccaaagcgggccgtctgaaagtgttccttaccgatatggaggcgtatatgtcatcatcggcggtgcgggaggcatcggcgaggtttggacagattatatggtgacggcgtataaagcccgagtcgtctggatcgggaggcggccgctggacagccggatacgccaaaaaatagaccggtaccggccatcaggcccggctcccgaatatatagcagcagatgcttctgatcttccatcgcttcagcgcgcctatgaacagattaaaaacacatacggcaccatcagcggcgtcgttcattcagcgatggtatttgcgaatgaaagcgtaaaagatatggaagaatcacagtttcacgccggccttgcggcgaaagtggatatttccgtcaacattgccgaagtatttgcgaaagagtctttggactttattctctttttctcttcggttatttcatatattaagaatccgaatcaaagtcattatgcggcggggtgcgcatttaaagacgcatttgcccatgagctttccgggcggctgtcatgcccggtcaaagtgatgaactgggggtattgggagcgggctgacaatcacatttctgaagagtttgacagactgagtgcaatcggtctcggactgatcagccgggcggaagggatgcaggcgctggaaactctgctgacgcagccgatctcccgcatggggctgatgaagctgaccaagccgattccgatcgagggaatgaaccctcatgaatttgtgactatctgattgcctgtcaaaatgacggagcaaatttaattttcttaggaggataaggttttgggtaagggagacaaacaaaaagaccgtacacagttatccttaagaacagaaataagcaatcaaatgaaagaattgaatcagcttttgctgcaagtgctgcgggtgacgctgcgttcaatgggtctgaccggcgaagcgccggcggcttcctgtctgcctttatatgagcgctggctggaagaaagcatccgtcttttagacagcgatcttaaaagcggtgaaacggccgcgatttgggaagagtggcataagaagaaaaacgaatggctgaaagatccggatatgaaagcgcaggctctgctggcggataccgtcattcaagctttgcctgacattttaacaggcaaaataaaagccactgacgtgatgtttcccgattcttcaatggagctcgttgaaggaatctataagcataacattctcgctgattattacaacgatgtgatggcaaatgaagcgtgtatttatgtggaaaatgtaattaaaaacaatcctgaggcaaacatccgtctgctggagatcggagcgggcaccggcggaacgagcagcacactgtttaaaaagctccgcccctatcaaaaccatattcaggaatactgttataccgacttgtcaaaagcttttttaatgcatgccgaaaaggaatacggcgcggacaatccgtatttgacgtatcagctgtttaatgtggagaagcctgcggcgggccagggattacatctgagaacctacgatatcgctatcgccgcaaacgtgctgcatgccaccaaaaatatccggaaaaccttacggacggcaaaagccgtattgaaaaaagacggtttgctgctcgttaatgaactgggcggacatacgccgtttacacatgttacattcggcttattagagggctggtggctgtacgaagacgaggcgctgcggattccggggtgccccggtctttatccggaaacatggaaatcggttttaatggctgaaggctttcattccattcaatttccggctgaaaacgaacgtctgcacacccagcagattatcacggcgaaaagcaacggagtcatcaggcagagcagggaagcttacaccgcgcaaaagcgccaatcaaacgtaccgcgaacattctctgatcgtcagctccccatcaaacaagcgggagaagggctttcggaaaagacagctgcttttctgataagggctgcggcaaaagtattaaaaatgccggcagaagagataaatccgctggctcctctggatgaatacggtattgactctattctgatcgttcagctgacgaacgagctgcgggatctcgtccctgatatcagcagcacgctgttttttgaacaccgaacgatagaagagcttgccgcatacttggctgaaacgaaggagcgcgaactgcttgcgcgattttctgaagaagtccgtcatactgaagcggtatcatcaggctctttgcttgaaaaaagcacagagtatctgaaacagatcgtcagcgtcatcttaaagatgccgattgaggacgttcaagcccatacgccccttgaagaatacggaattgattccatcttaatcgtacagctgaccaaccgcgtgcgggaagacgtccctgatatcagcagcacattgttcttcgagtatccgacaatcggcggattagcggaatatctcgtcagctcaagacaggaagatatggctgggattttcaagacaaataaagaagccgaaaaggtgccgcacactctacagaaaaagcaaagccgcaaaaaaagcgccggattgacgaagcgccaagcggcatctttttctgaaaaagcgccgcccgcctccgaaccgccgtcaaaacaccttgaagtggcaattgtcggtcttgccgggaagtatcccggagctgaaaatgttaatgagttctgggaacggttaaaaaccggtgaacacggaatcaccgaaattccgaaagaccgctgggattggcgggactactatgatgagacaaaaggtaaggaaggccggatgtatacaaagtggggcggctttttaacagacattgataaatttgatccgctgttttttaaaatctccccgaaagaagcggagcgcatggacccgcaggagagactgtttctggaaaccgcttatgcggcccttgaggatgccggatatacccctgattcactatgcgccggtaaaaaggttggtgtttttgcgggtgtcatgaacggcaactatccgacaggggcccactaccactttatcccgaaccgcgtatcctatgtgtttgattttcacggtccgagcatcgcggtcgataccgcatgctcctcatccttaaccgccattcatctcgccgcagaaagcatcagaacaggtgcatctgaatgcgcgattgccggcggcgtaaacctgattacagatccggttcattatatcggactgtcttctatgagaatgctgtcgccgtcaaacgcgtgcaaagcgttcggtgataaggctgacgggtttgttgacggagagggcgtcggctgtatcgtgttaaagccgttgaagaaggctgttgaagatcatgatcatatatacggtgtcattaaaggaagcgctctgaacgccggcggcaaaacgaacgggttcaccgttccgaatccgaatgcacaaggggaagtgatcgcagacgcgatggagcgggcaggaattgacccgagagcgatcagctatctggaagcccacggcaccggcacttccttgggagatccgattgaagtcgcggggttaaccaaggctttccgccgctatacggatgcaaagcaattttgttccatcggttctgttaaatccaatatcggacacctggaaagtgcggcgggcattgctgccgtcaccaaaattcttcttcagatgaaacacggatatctggtgccgtcgctgcattcaaagcagctgaacccggaaattgattttgaaacttctccttttatcgtgcagcaggaaacggcggaatggagacggccggtcatagaatctgaaggagtaacacgggaatatccgagaatcgcgggtacatcttctttcggagcgggcggggcaaatgcccatctgctgatagaagagtatgaaccggctgaaatgacttcggcggactccggccgtccggcgctttttgttttatcggcaaaagataaagaccgcttgcgcgagcgggctctgttgctgtcggatgccgccggaaacggaacaattacagatgcaaatctgcttgacgcggcatttacccttcaagtcggcagggttcagatggaagaacggctggcgatgacagcggactctgtttctgaattggaacagaagctgactgcttttctgaataatgccgattccgtaagcggggtgtttacgggccggagtgatagtgctgtcacagagacggaaggcacagtcggtgattggatggaaaaacgtcaatttggcagtcttttgaatgcctgggtccacggggcgcccgtcgattgggcatctttatataaaggcgcgctgccgcatcgtatcagtctgccgtcttatccatttgcaaaagaaagctactggatgaagcgggaagaaccaaaaacaggaacaactgaatatgtgcatcctttcctgcatgaaaatacgtcaaccttggcggagcaaagctatcatacatcttttacaggccgggaacacgttttccaggatgtgagaggagagcgggttctgtcggcagccgtttatttagaaatggcgcttgcggcttatcatcatgcggcagacagctctgaagaaaaagagatatggatccgaacggcggcatggactgacccgattaccggcggacatcacggtgcgggcgtcaatctctcccttctgtctgaagacgaggaaggcatccattatgaaatatacagtgatgaagagaagctgcatcattatggaatcatcggtcaagggaacgtacagccatcccgcatgcttgatattgcctccttacaaaaagactgtcgcccgctgtcattcgattatgaaacaccaggcacatcaggtgtaacgatcagtaaggagttccgcaccgttgaaaagctttatacgggagaaaatgcgatttgggcgaagcttgctcttacagatgaaagcggccgtaatccgggatatcatctaccgccggaatttctggacgcagcttttcatgtcttggcaaaaacggagccgtcagtccatatcgtgcctgaaacggttgaagaactgcgcgtcatgcgtccgtgttcatccggcatgtggatgtatatgaataaaaagaatcaaaccggctgtgacattcaattttgtgacgaaaccggcattgtatgcgcagaaatcaaaggggtgagaatgagacagccgtctcagcaggatcacgggcaagaggaacactccgagatgatgatatttgaagaaaggtggacgcagcagcctctgaagaaatccattcatgaagagctgaaaacggtcatctgttttcttacgggagaagctgccagaaaacatgcttatcggtctttacaatccctttatccgggagccggcgtgttttttatttcacagggtgaggaaactcaaaagctttcaaacacgcattatcaaattaaaatcactgacggacaagcatatcaagaaacgtttcggcatattgaaacggctgcaggcaaggcggatgccgttttgtatggatggccgcttgaagatgaaaaggccgtgaaagactattccattctgtatcatgtgatccgcgcagctgcttctttgcgttctaaaccgaggcggatccttctttccgctcagtgcgggaccgaaaccgatatcagttacgccgagtcatggatcgggctggaacggtcgctgaaactgatcctgccggagacggatacggccgcggtttattttggacaaagaggaccgtttgaaaagctgatccataatgtatgtgaagagcttcacagcgggtcgttccgcagtgtcatgtacagtggggaaatccgtcacgtcatggaaatgaagcagacggatattgcccctgttgagaggcgtgtgataaaaagcggaaaaacgtacttgattaccggcggatgcggaggtttgggcttgttatttgccggatattttgctgaaaaaggaccggttacgctcattttgacggggagatcagcggcaggcggcccggtgctgcacaagataaagagattggaagaatcaggcgccaaggtgttttacgtgcaggcggatgccgcagatcaggctcagatggagaaaggtttgcaagaagcgaaagagaaaggatgcgggccgattcacggtgtcattcacgctgcaggtcttcaaggcactgaaagcattctggagaaagatctgcaaacctttcagcaagtcttatcgccaaaaacggacggcacagcggtgttagatcaggttctgtcacgggagccgcttgacttcttctgttgtttctcttcttcttcagcgattttaggagacttcggttcttgtgactacgcaatggggaaccgcttccaaatggcttttatccgccaccgggataaacttgtgagcctcggactcagaagcggcaagtcacttgcaatcaattggccgctttggaaagaaggggggatgcatgtcggcacggcggaaagcaccgatatgtatttaaaatcaagcggacagcgttatttatatacaaaggaaggactcgaagcttttgaaacattgttagtccagccgtccagccagtatctcgtcctggccggttttccgtcgagggccaaacgcttcctgcagatagatcaaggcgaacggccgatttcgggttctgtaaataggaacgtcccgttttcaggaaggcggagtgaaatgaaaggctttacactggaagaatgcgtaagctgggatgtgaaggaactggcggcggggcttttgaaaatagacaagaacagactgacggatgctgacaatctggctgatttcggctttgattctatcagtttggcggaattcgcctcttctttgtccgctcactacggaattgaagtgaccccggccctgtttttcggacattccacactggagaaggtcgtccgctattttctgacggaacacaagtccgtcatagagcatgtctatgaagaaaagaaacctgaatccgcagatcaatctgtctttgaaaaggcaggaacggaaaagcgaaagaagcagaggggaagaaataagctgaacgccggaaccgagggcagtcaggcagctgattccattgccattatcggcatgagcggccgctttcctcaggcgcgcacggcggacgagctgtgggacattctgtttcaggaaaaggacgttgtcgcaccggtcgcaaaaaaaggcttcacaagttcaaaatggaaactcggcgctgtaccgggggcggacgaattcgaccctttattttttgaaatatcgccgagggaagctgaaacgatggatccgaagcagcggctgctacttcaggaagcgtggcgggcccttgaggatgccggctacggcgccagtcacatcaggcagcagacgatcggtatgtttgtgggtgcggaagaaggagattatcaccttttaacacgggacaaaggcaatgtcacgtctcatcataacggtattttggcggcgcggctggcttatcacttgaatttatcaggtcctgtgatggcgataaatacagcatgttcttcggggctcgtttctgtccatcaggcggtattaagcctgcagaataaagagtgtacaacagctgttgcggccggggtgaatatcatgaataccccggacttttttgaaacgatagataaagccggaatgctgtcggaaaacgggaaatgcttcgcgtttgataaaagggctgacggcctggttcccggggaagcggctgcggcggttgttcttaagccgctgagagaggcggaagaagatggcgatccgatttacggggtgattcgggcgagcggcatcaattatgacgggaaaacaaacggaattaccgctcctagcggcgtcgcgcagacccggctgcttacttccgtttatgaccggggccgtatcaaccctgaagatatcgaatatatcgtcacacacggcacgggtacaaaactcggtgatccggtggaaattaacgcgctttatgacgcattttctgcctatacaaacgaagaagcattttgcgcgctcacatcaattaaaaccaatatcggccacacgtttgccgcgtcaggcattgtcagtttgatcagtcttttacaggcattctcccgtgaaatgattcccgccagtctgcattgcagcggggaaaaccgctatatcaactgggagaaaagtcctttttatgtgaataaaacggctaaagcgtggccttctctgccgggtaaaaaccgaatgggggcagtcagcgcattcgggatgagcggaacaaacgcccatgtcgttatggaaagctataagcgcagcgcttcacctcatccggatgcccctgcttatttactgactttatcagcaaaaacaaaggaggcccttcaggaaaaaatcgaagatatgatcacttgggcggaaaatggcggactgaaagaaaatgatctagcccagctcagctatacgttgctaaaaggacggcatcactttaaccatcgcgccgccatcgtggttcaagatgctgatgacgcagtgtatgtatggaagcaggcaaagcttaatgaacatcatccttatgtgttttcgggaaaagtaccgcagcactttgcaggccgacagcatattcaggagcacataatagaagtgctcggcaagtgcagcgcttcatattctgaccatagaaaatatcaggaactgttatgcgtgctggcagatttttattgtcaaggttatgaaattgaaggggacttgctttatggcggacctttgccgcgaatcggcaatctgccgggctacccgtttgccaggcagacgtattgggcgtccgatcgtcttcagggagagcttgaaagccggaattcagctgaacgtgaaaagcttcacccgctgctccatgcgaatacatcgacctttaccgcccagcgctttacttctgttttttcagggcgtgaaccgttttttgccgatcacatcgtcaatggaaaaccggtgcttccgggcgcggctgctttagaaatggcccgggccgccgttacacttgccgctgagggcttgccgggcggaaaagcgggtgtccggctcaaacagatcgtttggctccgtccggtgacggcgctttctgaaggcgtgacgcttcatgtaaaacttcagccggaagaaaacggagacatcgcttttgaagcgtatgccgaaggagaagagccgcttgtctttttccagggaaaggccgtgctcgaagagacggagcgtgctccggtactcgatgtggaggcggttcaggcgcgctgcggcggccggcacatgtcaaaggctgagtgttatgaagcattcgacagcctcggcatcacctacggaccgtctcatcaggcgcttgacgccgtctatgccggaagcggagaagtgctcgcgaagctcactcttccgccgtccgcccgcgaagaaaaggagccgttcttcctgcacccgagcatgctggacgccgcccttcaggcttctatcggtctcgtgctctcagacggttccgcgtccggacggccgtttctgccgtttgccctccgggatatgcaggtgttttctgcgtgccgggagacgatgtgggcggtgctttcctcagcggacggcgcctatcatattgagctgtgtgatgaaaacggcgaggtatgcgtccgattgacggggctcaccgcccgttttctggaagaggaaacggagggaaaaccgctcttgcttcagccaaagtggcaggaatcaccgccgggtgaaggcggcggacaagcagagtctttcagatacgtgacgctgtatggcggaatgaacgctgaggacataaacggcgccgtatgtgcggctgacggggaaggtccgattgaagaccgttatgacgcctgcgcggcggagctgtcagcgatcgtcaagcgtcttatcaaagaaaaacagaagggaaaaacgctgatccagcttcttgtccccgacagggggaagacaatgtattggcggggctggccgctttcctgaaaacggctcaccttgaacatccgaagctgtacggccaagtcatccaagccgatccggacgagccagcatcatcgcttcttgccaagctgaaagaaaaccggacgcaccctgaacaagcggaaatccgttatgaagccggcaaacgtctcgtcagaaactggcgtcacctgcctgcgcttcaaagcggcgccgttccgtggaaagacgaaggggtttacctcctcaccgggggagcgggcggcatcgggctgattttcgctgaagaaatagcctcccgcgtcaaaaacgccgtcctcatattaacgggaagggcggaagcgcttgataaagaccgctccgcccgcttacggcgcttggaagcgtcgggtgcccgcgtactgtatcaaccggttgatgtgacagacagggcggcggtcatcgccctcgtccgcggcatacaggaggagcacggaacactcgacgggatcattcacggcgccggcgtgatcgccgacaattacattctgaaccagacagaaaacgaacggaagaccgtcatggcgccgaaggtgaaagggcttatcaatcttgatgaagcagcgaaagatgcgcggctggactttttcattctgttttcttccttggcgggaggtatgggaaacccggggcaggccggttatgcggcagccaacgcatttatggacgtatatgcagcccgccgaaatcgtctcgtgcgggacaacaagcggagcgggcagaccctgtccgtcaactggccgctttgggaagagggcggtatgcgcgtggacaaagagaccgaacggctgatgtatgaacagaccggaatgaaagccatgcgatcggcttcaggcatccaggcgctttacgccgcttttgcctccggagaacaccagatcatggtggcagaaggagatgaaaaacggattcgcagccatgttttcgatctgcgtgaagaacaaagcgccgccgcaaaagctccggcagagacagatgcaggagatctgaaagatcgggttcaagagaaactaaagcgtcatgtatcagatcttttaaaggtaagcatgaaagatattgaggctgacagcgaactgacggaatacggatttgattcgatcatcttcactgaatttacaaatctattaaatcggtcttatcagcttgagctcagcccgactatcttctttgaatttccgacattgcgcaaactgagcggccatttgatatctgaatggaaagaagcattcagcggcttagaaagagagaattttaaaaccgccccaaaagccggaataagaaaagctgaagctccggcggccgttcatgtcaaacgggaaacgcccgtatccgtaaaaggaaaatcagaagaaaaaaccgaaccgatagccattatcggaatcagcggtatttttccgcaagcgaaagacatagatgaattctggacacgtttatcaaaaggagagcattgcatcacagaaattccccgggatcgctggaattggcgcgaatattacggcgatccggcagcggatgcaaataaaacgtcaattaaatggggcggttttatagatggaatcgccgggtttgacccgctgtttttcgggatatctccgaaagaagctgaaatgatggatcctcagcagcgcctattaatgatgtatgtgtggaaagccattgaagacgcggggtactcggcaaaacggattgccggaacaaaaaccggcattttcaccggcacattgggaagcggatatcaaaccttaatcaataaggcgggtcttcctgtcgaggggtatacgatgaccggaatcgtgccgtccgtcgggccgaaccgaatgagttattttcttgatatccacgggccgagcgagccgatagaaaccgcttgttcaagctctttagtcgccattcaccgcgcggtaaaagccattgaaacgggagattgtgatatggcggtcgcaggaggcgtcaacacgatcgtcacgccagaagggcatatcggttttcaaaaagcaggcatgctcagtgaagacgggcgctgcaaaacattttctgatcaggctgacggttatgtcagaggagagggtgccggcatgattgtcttgaaaaagctttcagaggctgagcatgacagggatcacatctacggcctcatccgcggtacagcggaaaatcacggcggacgctcagcgtcacttaccgcgccgaacccgcaggctcagacggatgtgctgaaaagcgcttatcaaaaagccggtattcagccgtcaacgatcacttatatagaagcgcacggaacaggtacggcgctcggagatccgattgaaatcaatgcattgaaaaaagctttccaaacagacggggctccgggcggatattgcgggattggctcagtgaagacaaatatcggacatttggagctcgcagcaggcattgcgggcgttatcaaagtattgatgcagctgaaacatcggacgctcgccaaaagtctgcattgcgagaacatcaatccccatatcaaattgaaggacagcccgttttacattgtgacagaaacaaaggagtgggaagcgctgcgtgatgaaaacggccgggtcctgccccgccgggcgggtgtaagctcattcggtttcggaggcgtcaatgcgcatatcgttattgaagaatacatgggcaaaagtgagacggaacagccggaaacccgtgagaaagcgtcatctctttttgttttgtcggctaaaaatgaagagcggctgaaagaaagagcgcgtctccttcgcgattttatccaaaacggatcatcccgccatatcgatcttgcagatgttgcatacacactgcagaccggacgggacgcaatggaagcgaggctgggaatcattgcaggctccgcagaggaactgactgaaaaactgaacgcgtttctgacgggaaaaaacagcgaagatatcatcagcggccgtaaaaaacgcgagaataacacgatctccatgttctcagacgatgaagacgcagctgacctcgtcagcgcctggattgagaaaaagaaatacaagaaagtgctgcggctctgggtaaacggatttgacacagattgggagcagctgtatacggacagtaagcctcgccgcatcagcctgccctcctatccgttcagagcagaccgctattgggtgccgaaacgggagcagctgccgctttcgaatcaaaaaacagtagtattgcagaaaacatgggagccttgcgaggcagtgtcttcatccgagccattcagcaaaatagcgctcatcgtctccgaggatacaaaagaccttgccgccgaggtgaaaaaacagctgaatgatgctgacattgtgcaggaaaatcagctcatctctttcttacaggatgcgaatgcggccatctattccgggtttattgacttcaccggctgcggctcccgacaaaagcggcaggacatcagctgggtggcatcgctgcagcagctgattgaatacggccgcggaaaagaaaacatgaaaatgctttatcttacaaaaggccttgaatccttcaaaaataatgcggccgctatgcatggtattgaaaaagcggggctttatcgcatgctgcggcatgaatacagccatattctcacctgtcacgccgatattgatcctgaagagccgctggagcagacagccgcttttattaaacaagaaattgaatcagacttaacggaatctgctgtttgctacagggacggcatgcgcttcagctatgttcttcggcagactgatcagattgaaccagaagccgtgcaaacagaccggactgtgtttccaaaagacgccgtcctcatgataaccggaggaacgcgcggactcggcgctttatgcgccaagcatttcgtttccgcatacggtgtgaagaaactgcttctgacaggcagaaaggagctgccgccgaaaacagagtgggatcttgagcaaacagaccctgtcgtttcggaaaaaatacagcttatccgaaagctggaatcacagggcgtaaaagtgtgcgtctcagcagttgatctgacggataagcaggccgtcggacggcttataaaagaggtaaccacaacgctcggacctgtcggaggcattctgcattgcgcaggaattgcggaccgtgaaaaccctgcttttctccgcaaatccaaagacagtatcgcgcgggtgctcgcaccgaaagcagacggcctccgcggtctgtatgagagtgtaaaggatgatgcgccggcatttttcgtcctgttttcatctgtctcggcagccgtcccgattcttgcggcgggacagagcgattatgcgatggctaattcttatatggactattttgcagaaaacaatgagggcggcatcatgagcatacaatggccggcatgggatgagacgggcatgagcagggatacaaaaagcgggatgtatcagcaaacgggattgctgcgtcactctgacgcggaaggtctcaagatgcttgattacattttaagagaaagacccggaactgtcgtgctgccggcacaagtgaaaaatgattgggacatcaaagcgcttgaaaacgccaagccagccgcccataaaggaatgagaacagcttccaaacctcctgaaacaaaaaaacgggtccataaccggactgatattcaatcttggctgaagtcgcttttggcaaaagagctgagtatcgatgaaacgcatatggatatcgatgtgccttttcaggaatacggaatggattctatctttctggcgcaagtgctgacaaagatcgatcaaaaactgccgtccgtttcaattgatccgactgtccttctggaacaccctaccatagaacagctcgcggattatttagccgcacattgtccggaagctttttcggcagatgcagcggttcccgcggagaaggtccctttgcagaaaacgccgaaacagagcaaaaaaacggcagataagcccgggaaacggggaaaggttgcgatcatcggcatggcctgtcattttccggaagcgggggatataaaagaattttggaagaatctccgcagcggaacggatgccgtcactgaagttccgccggacagatggaacgccggggaacactatcagccgggtgaatatcaagaaggaaaaagcatcagtaaatggggcggttttattcatgatattgatcaatttgacccggagtattttaatatttcagaaacgctggcaccgatgatagacccgctgcaaaggcagtggctcgaagtgagcgcggaagctttggccgatgccggttatcaaaaagaggatctctggggccgccgtatcggcgtttttgccggtgcaagggcaggtgcgtttcatcagaaatttcaatatttgcaaaaagacgcgattattggcgcggggcaaaattttattaccgcacatatggcgcacatttataactttacagggcccaacctggtcgtagatacggcctgctccagttcgcttacggcaattcatttggccgtgcaggctattcaaaatggagaagcggaggcggcctttgcgggcggggttgacattttgcttgatgaaaaaccttttctcacaatgagcgcggcgagaatcttatcgccaaatggccgttcaaaatctttcgatgccgatgcggacggaacaggaatcggagagggctgcggtgtgctgatgctgaagccgctcgaaaaagcgatagaagacgaagataaaatatacggcgttattgacggctctgcgataaataatgacggcagcacaatgggggtgactacgccgaatccccgggcgcagcaggacttgattgagcaggcggttcaatcagcggaaatcgagccggacaccatgacatacgtagagacgcacggaaccggtactttgatcggcgacccgattgaattaaaaggattaaccaatgtcttgtctgcttattccgatgaaaaacaattttgcggtgtagggagcgtcaaaagcaatatcggccacttgctgagtgcggcgggcgcggcgggaatcatcaaagttttgctggcgattgccaatgaagaactgccgccgactttgcattgccataaaccgaacccccgctttcaatttcatgattcgccgctttatcctgtgcttgagctgaagcggtgggacggaaaaaaagagatactcagggccggggtcagcgcgttcggtttgggcgggaataacgcccatatcattgtcagcaacgaaggaattccgaaagaacgaaaagcgaccatggaaccgaaaggcggccagacagtataccgaaaacagcggtattggcctgaaaaagcacagttgtccgaagcggaagaaaatgaggcgggcacagaagcaatgtttgaaataagcgaggtgtgatagattggcagttgccaccgatcaagtcaaaacgttcctgcagaaaatcagccatacgaattatatcgtccgggatcatcgcgttcaccaaatccgcgtcctcccgggcgtgactttaatagatatgctgtatcggctcgccgccgggtatctcggtgaaaggcctatagaattaagacagattatttttaagcagcctgttgtaacatctgaagagtttgataaacacctgtatgtcacctttacgccggcgcgtgacagctggaaagttgagattacaagcgaaaaagcaaaaaacggcacaccgcttggcggaaaacgggatgagaatatggaatgtcagctttatttgcaaaaagacacgccccgggcaaaagagctgaatattgaagcattcatgaaaaacgcaagccgaaaatgggacatgcatgacatttacggaattgcaagaagaagccatattgagcatggcgagtttatgaaaaatgaaggggccgtttatcagcttcaggataaagaagaattaatggagctcactctgagtgatttggctgaaggattccgggagaaattcaaggcgcatccggcttttttagatgcgtccacccttgccggctcttcctttgcattgtcggcccaaaagcagaatgacacaccgtatattccttttatgattaatcgtttttgcatatatcagccgtttccgaaaacgatttacacttattctgcggaaaacagccgcactgaaagcggcgcatcagatagcgaacctgatttttattcggccgacttcacgatttacgacagggaagggaacgtattggccgaatgtgagaaactgacagtaaaaagggtcagacaagcgaatatgattacccatctgatagacaaagagaagccgcctcagcagaacaaaaacggccgtggagagcccgaaagtcctgtggccgcagaagacgtgtctgaacagcaaacgccggaacaaaacatggtgacttacataaagtcggaaatcgccaggctgatcaatcgtccggcacaggatattgatgtgcggaaaggcttttatgatatggggcttgactcggcgcatttgctgaagcttgtaaagatattagagcagacttttcagcagcagttttatccgacactgctttttgaatattcatctgtccgccgccttgcggattaccttatcaatgaagcgggctgtgtgctgaaagattcggccgaagaacggcatacatcagacgctgacatcgctgatgaggttctgttttttgaacccgcctggaaagatcatccgctggaaacggcggtgcagaacgggcaaaaacacacccgtcatcttattattgctgccgatgcaggaccccgtctcaccggtgaactcggcacacattgcccggaagcggaagtgatagaactgaaaagggagcatgaggttgcagatgagcagtttggagcagatgccgagcttatatttcgtatgcttaaacgggaactgacagaccatccgaaagaacatacattgattcagcttgtatgcgccgttgagaatggagcggcattgtcttccgctctcggggctatgctgaaaacggcacatctggaaaatccggctcttcgcactcaggtgatcaccttctgtgacaagaatgagagattgccaagtgagacggccgcaatcattagaacagaagcagactgctctcatgcaggctgcacagacattcggtataaagacgatatgcggcagatcagattgttcgaacgtattgagaaaccgggcggacagacacagtctccttggaaacaaaacggcgtatatgtcattacaggaggtctcggcggtcttggatttctgcttgcccgtcaccttgcagaaaaagaaaaggtgaagctcgcactcatcgggcgttcgccggaacagtctgagaagatcagcagactgaaagcattgggagcggaagttctttacgttcaagcggacatcggcagcaaagccgaaacagagcgggcatttgctcagattacagaaactttcggccgtctgacgggcatttttcattgcgccggtgttttaaaagatcaatttatcatccaaaaagacagtactgacttgaagagggtgttcctgccgaaaatcagcggcctgattcatgcggacgaagcttcacggcatgaaccgcttgaatttttcgccgcattttcctcattctcggcgttgaccggaaatgcgggccagacagattatgccgcagcgaacgcttttatggatgaatatatgaaatatcgcgattgcaaagcggaaaaaggcgaacggaccggggcttctatgacgatcaactggccgctttgggaagatggcggcatgcaggttgacagtttgatgaaagagatcatgaatgatgcaaccggcaccagcccgcttccggccggggaagggatggcttcactagaatatatgctgcgtctcggcaagctgcaatccgttattttatacgggaaggagcctgctgtaactgaaagcatggcccgattggttccgatggcagacaagaaccgctcttcattatcccatgcagctgtcaagagaaggagccgaaaacaagagagacatacagaagagcacgatattgccgtaatcggattggcgggaagatatccgcaggcgggaagcatcgatgaattttaccaaaatctgcgctcaggtaaagactgtatcacaacaatgccgaaagacagatggaaaggttatcctttctcatatgaagcagatcagttctactgttacggaggatttttagatcgcatagacagctttgatccgctgtttttcaatctgactccgcgccaggctgaaatgatggacccgcaggcgcggctgtttttagagacggcttgggaagcttgtgaagatgccggtttttatcaggacagaacggcgcgcgggccatcttcacaaaaaagaaaacgcgtcggggtattcgcaggtgtgttttggagccattatgagctgttcggcgctgaaatcacacagcggggcacaccgctgtctatgggcgtgacgcctgcctccgttccgaatatcgtgtctcactgcctgaactttacagggccgtcaatggctgttgatacgatgtgctcttcttcgctcacatccatacatttggcatgtgaaagcattaaaaggggggagtgcgaattcgccattgccggcggtgttaatgcggtcacacatccgcataaatatgcgtttttggcgaatgccggatttctgtcttcagaaggcgtctgcaaaagcttcgccgacggcggtgacggctatgtgccgggagaaggcgtcggcgcggtgttgctgacaaccgttcaagaagcggaaaagatgggctgtccgatatatggcgtcataaaaggctccgctttaaaccatgtcggaaaaacatccggtttgaccgtgcctgatccggcatcacaggcggaagtcattacagattcctttcagagtgccggcattgatccggagacattgagctatattgaagctcacggaacgggtacgtctctgggtgatccgattgaaattgaagggctgagccgcgctttccgcaaatggacaaacaaaaagcggttttgcgccatcggctctgccaaatcaaatatcggccatttagaaggagccgccggaatcgccggattaacaaaggtgcttttgcagctgaagcatggagaaatctttccgtcattgcacgcggacacgctgaatccccatattccatttccggatacgccgttttatgtggcggaccggctggaagaatgggaacggccgtcacatcctgaccagccgagaagagcgggtttaagttcttttggcgccagcgggagcaatgcccattttgtcatagaagaatatctgccgccgcaggctgaaaagaaatcgctgagtatacgggaagacgagccggttctgtttctgctttcggcaaaaaatgaagaacggctattggaatatgtcaaacggtatgaccgctttttacgggaaaaagaagtcaatcttaaagacctggcctacacgcttcaagcgggcagagaagcgatgcctgaacggctggcattgatcgttacatccgtttgcggcctgcaagcgaaactgaaggatgtgcttgaacggaaaacggaaattgaagggtgtttccgcggacgtgctcaagatgttatttcaacaagtggaatggccgagcttttgaaaaacaagcaatattccagattgctcacggagtgggcaaaaggagccgccgttgactggagccagttatacgaaggagagaagccgaaacgggtcagccttcctgtatatccgttcgcgaaggagcggtattgggtgcctgtgcctgcggatatccggaaacagacagacgaaccggcggaaaaccaaaagatcattcttcaaaaagactggaagcagcaagatccggcggagtctgaagcattatcaggaacagtaatgatacttgcaactgataagacgagccgattggccgatgctctatttaaaggaaacggccatattgaaacgatctgtttcatccatcaggcaaaagacggcgccgattattacgctgccgcatcggggcgaaacctttacggcagagtgcgggagtctcttcaaaacaaacagatactcggggtcgtcgacataaccgcatatgatgcggaatatgaacggcgggaagagatagaatacggaaagcttgcctttttacagcaggttctggaatcattccgtcatagcggcgctgtgctcagccaagtgacacaccgcctccagcctttcaaggaaagtaaacctctgatgcagggggcgaaaacggcggggctgtaccggatgctgggcgctgagtatgccaacattcattcttttacgatagatagcgattgtgcgattgagcatacagaagaattaagcagacagattgaaactgaatttttacagccgcgggccaaaagcggcagtgaatgctgctacaggctgaatcgccgttatgtgccgtttctgaagccgggtacgaatgtgtctgcggtgcctgagctttcctattcgtctgatgatgtgctgttaataacgggcggatcgcgcgggatcggcgcaattgcggcggagcatgccgtttcacgcgggtgcagaaaactggtcatcatggggcgggagccgcttcccgattcctcggagtgggaagacatgaaaaaggacggcattctcccggaaaaagccgagcggatgcagaggttagccgagcggggcgcggagatccgttattacagcgtttctcttacggatcaaaaggggctccggaacatgacggacagcatccgcggcacaatgggaccgattaccggtgtttttcattgcgcgggtgcaatgggagaacaccccgctttttataacaaaaccgaaactgagatcgaaagcgtttgcacgccgaaagtaacagggcttggcggtctctatgaagccgttcggaatgagccgctgtcgttttttattttgttctcatccgtttcgggtctgatcccttcgcttgctgcggggcaaagtgactacgcgatggctaattcatttatggactcttttgcaaatcatcaggcaggcaaaggaaacgtgtttgttaaagccgttcaatggcccgtctggaaagaaaccggcatggctgaaggcctgccggaaacacctgcttatcaaaaatcaggactttccaggctgtctgccgaagacggactgaagtttttagattacatcatattaaacggacaaagctgcggaattccttgtgttcccgaagacagtaaggctgattttggtgatcttctgaaggtgaagaaaactgaagctcccatgaaaaaaagcagtgccggtgaccaaaaggtgaaggatatgattcgtcaatgggtgcgcaccgttttcagcgaagaactgaaaatgacggatgagcagataaaagatgatatgccgtttgatgaatacgggattgactcaatactctttgcggaattggttcaatcattgcaaaaacggatcagcatcaagttaacaccgtccttaatgcttcaatatcaaacgattacagaaatggttgactatttcgcagcgcatcatgaagccgattttgtgacaaaagaaaatggtttcgttcaagacggggacgttcagcctgatgtaaccgccgccgctgaagagagaacatccatgaagccgaaagcggataccgaagacgatattgccgtcgtcggcatctcctgccgttttccgggggcgggcggaacggatgctttttgggagctgctgatgaaagggaatactgccatccggcctgtccccgcatcgcgctggcatgcaacagcaaatgcaaaggattatgcggggtggattgatgatatcgacatgtttgatgcgggctttttcggcatctctgaaaaagacgcggcaattatggacccgcaggcgcggatcatattagaagaagcggttcattccgtttatgatgccgggtacggccaaaaggatttgtcgggccggaaagtcggcgtgtacatcggcggcagggcgcagccttcagccggtatggaacatatcctgcaggcgcctaacccgattttgggggcggggcaaaactatttggcggccaacatttcacgatttttgaatgtcacagggccgagccttgtcgtggatacagcatgttcctcagggctgatcgggctgtcctttgcaaaagacgcccttttggccggaaggattgacgcggccttagtcggttcggtgagtctgctcttatctccgtccgcgcaccggttattcggagcgcgccatattttaaatgagaacggcgtgtttcatatattcgaccgtgaatcagcgggagaagtgctcggagaaggagcgggggcggtttttatcaagcgattgagcgatgcggtgcgggacggagaccgcatttacggcgtcataaaagccgtctcggtaaacaatgacggccggacgctcggtcccggttcaccgaatataagagcgcagagagatgtcattcaaactgcgcttaatatggcggaaaagtcgcctgaagacatcggatatatagaagtgaacggaggcggttccccaatcgttgattcggtggaaatcaaggcgctctcagatgtctatcagctgaaccggaaaacgcttctgccctgccggatcggatcggtgaaaccgaatgtagggcatttgcttctgtcttcaggtcttgcgggcttcatccgatgtgtgctgagcgtctatcataagcggattccgcctttcttatcagcgcgtgacccatttgaacattatgactttgaagcgtcgcgtattcattttaatcgtgaacccgttgattggcattcagagaagaaaccccgcgtcgcagctcagagttcatttcctgacggcgggacaaatgctcatatcctcgttgaagaatacagaggtgaaagacagcgggaacatcaccggtcgcctcagccgccggaattcagaaaaaaacactacccgctcttgggcggctggaacagcacggaaagtgaaccggaaaaaacaagtaatgaaaaaacggacattgcggatcttttaaagaaatatgagaaaaaagcagagacaagcactgcacctgcagactcgttttggcaggtgacaacgtgacgtttttaaaaggggactaaccatgaaaaaaacagtgaatctgcgcctgacggcagagcatcccattatgaaaaaccatcttgttcacggagaatctgtcatgcccggtctggcctatattgatatgctgtatcagctggcaaagcaaagccttgatctttcattccgttccatctgtctgaaacgggtgaccatttatcatcctttatcagtgaagcggtcagagcggcttgatgtgagtgtcatattcagtaaagaaaaggagttctggactgcctcgatttgcgaggcggattccgggacggttttcttatcagcggagatgcatgaagaagtcttctcatcagacaggcgtcttgacgcaggggagaaaaaacaacaagccgcacttccatcagtctccttgcatgcggtttacgaagccgcgagaagccgcggactgtcgcatgacgggctgatgaagccggagggagagatctatgcttatgaagaggcatgtttccttgatattcggcagtctgattcatgccgggaaaatctccccggcgctctctttcatcccgcgctgatggacggtgccgccatggcctccggcgtattgcagacagctgcaggcgccgagttatttttaccgatttattatgagtcgtttattgccgctgagactgttacggagcgctgttacgcggtgatttcgaaaaagtccggcacgccttctgaaatggtgaaaatggatattgacttttacaacctcagcggtgcgcatattgcttcactgctcggcctgacagccaaaaaggtgcggtttgaccggcagctgataccaggcgttcagcagatggaggaaaccttataccgcattttctcgacatacgtaggccgttcagtcacaagaaatgatgcgcacaccgtgttttttgaattaggtcttgaatcgtcacagcttctggctattattaaagacatcgaaggggcgtttgatctgcgtctgaatccgactcttttatttgagtgcagcagcatatccgaactgctcgaagacataaaaacaaaaggaacagatgaatcttccagccttgtcgcagatgcagcaccggtctctgaaacacaatcaggcagtcagacatttactttctatgaacatgaagcattccttcaggatcatctggttttcggcaaaccggcactgatgggtgtagtgtatccgtgtctggtgcttgaagcatccggagcgtctcattccggcacgtgtcccgccgagctgaaagatatccgctttacgggcgggcccgtcacgctggagcctggagaggccgcgcagattgacatttcatttgcggcagaaaagagtgccgaacgctttacagcaagctgcactgtctccggtaaagaaagccggaagacatgtgcggaaggagaaataagcagatatacagaggcacccataaaaaaatcatatgacgttgagcaaatgaagtcgcatgcacaaaaggtggcgccggatgtcatttcccgtctgtacgattcggttgccgacttcacgataggcccgatgctgaaaacggtaacagcgggatacaaaatgagtgagagctcctttttattgcagctggacttatcaggaaaaaaagaaaaaggcgatctgcatcactttgcatttgacccgcttatattgaattcatgttatatgtcgctcggtgaagaagaattgcagctgaaaaagcggattcacgtcccgctcatgattgagaggctgacgctttacggacctgtcatgtctgataccgtctatgtggtgaatacaatcaaacataaaaaagacgggtttctctcatttgatgccgcaatcctcagtcataccggggaacagctggcggaattgaaaaatgcgtctgtgaaagaagtgcttcagccaaatcggcttgaaaatgcgtcttttgccccgtccgggaatcaaagccgtcaggaaacgaaaggaaaaccgctggatattgccattgtcgggatttccggcaagtatccgcaggccgatgatatcgatgcgttttgggataatctcaaacaaggcaaggattgtattaccgaaattccgaaagatcgctggaaatgggaacattacttttccgaggaccgtacggcgccgggagcgatctacagcaaatggggcgggttcattgacgggatcgccgattttgatcctgagttttttaagatttcccccgggaagcggaacaccttgatccccaggagcggctgtttttaatgcatgcttggatggccatggaggatgcgggatatacgaggacatcacctgaactggggcgtcaggtaggcgtgtatgccggtgtcatgtatcaggaatacccgctattcgcggctgaagcgggagtgaaaggacggcatatcgggctccccggcgggatttcatccattgctaaccgtgtctcctatttttgtgactttcaagggccgagcatttcggtcgatacgatgtgttcgggttcgctgacttcattgtacatggcgtgccgggatctgcgggatcatcggattcgcgcggcgcttgccggcggagtgaatctcaccgttcatcctaacaagtacttcatgctgagccaggggcagttcatctcatctaaaggacactgcgggagtttcggcgccggaggtgacggctatattccggcagaaggggtcggggtgctgcttcttaaacgtttagaagacgccgtacaagacggagatcggatttacggcgtcattaaaggagctgccattaatcacggcgggagagcgagcggttacaccgtcccgaaccccaaggcgcaaagcgaagtcatttctcaagctttacaggaagcgggggtatctccgggccggatcagctatgtggaagcgcacgggacagggacgaaattaggcgatccgattgaaatccgggctttaaccgatgcattcggtgatgttcctgaaacatgtcttgtcgggtctgtcaaatcaaatatcggacatggggaatcggcagcaggcatcgccgcagttacaaaagtgctgctgcagatgaagcacaaacaaatcgccccatccttgcatgctgatgttttaaatccgaatattcaatttgatgaagggccgttttccgtctgccgtgaattaacagattggaaacggatttcagcagacggagaagaacagccgctcagggcgggaatcagcagctttggtgcgggcggttctaacgcgcatatcattattgaagaatatgaggctcctgtcaaacaagcaatcagcagccaagagccggcggtcattctgctgtctgcgaaaaatggcgagcgtctgacagaatatgcggagcgccttcttgcttttcttcaaaagaagcatattgataagccggacttatttgatgtcgcgtacactttacaagcggggcgcgaagcgatggatgagcggctggctctcattgcggactcccttaaggagctggaggacaagctcagatcgtacttggaaaatgaaaacgcaccgcatctttacaggggacgggcgaagcgaaatcatgagacagtggctgtgtttgaatctgatgaagatttgcaggaagcgatggttaaatggctgaaaaagagaaagtacggtcatttgctgaaaatgtgggtgcagggagtcgatgtggactggaacttgttatattcggaacaaaaaccccggagaatcagtcttcccgtctatccgtttgcaaaagtcagatgctggattcaagatgaagccgaggcggtttcaaaaagggatgacggcaaaacggtgatccatccgctgctccatgaaaacacatccgatctttgggagctgaaattcacctctgtttttaccggacgggaattctttttcactgatcacacagttaatggacagaaggtgctcccgggagccgccgtgatcgaaatggccagagcggccgttgagcgtgccgcatacgctgtgccggacggacgtaaaggaatgtatttgaaagatctcatatggatgaggcctgtcattcataaagggacggatgtagaagtccatatcagccttattcttaaggaaaatgaagacattgaatttacgatttacagcctatcggaagaacctggggagaacggattttatacagtaaaggcactgcggtatcgggagagatagcagcggttccgtctgttcatttagagggctggctgtccggctgcagtcaatcggttatgacgtctgatgaggtttatcaggctttccggcatgcgggtatgatctacgggccgagccatcaaggcattgatcagctgatgatcggagagaggggggctgcagcccggctgtcgctgccggaaacggcagacagtaccgccgatcagtttgtcatccatccgagtcttctggatgccgcgtttcaggcgtcactgggggccggttcagatactgccggagacactccgatgctgccgttttccctgcggcaggcagaaatatttcagccgactcagaaaacgatgtgggcgcttgtccgcaaacagagcgatcggtcagataacggagcgctgacgctggatattgatttatgtgatgaaaacggcgctgtttgtatgagattgacgggcttctcctgccgggctgtccggcagacaaaccaaaccgaaagcaaacggcaggaagttcagacggcgatgcttgcccctgtttgggacaaaactttcttttccctggaagaaaatcgagcggttgatcaggaacaattgctgatcatcggaaagccgggaaataccataaaggccgcggcaaaaatgtggccccgcgcccatctggcggagacgccggatcattcaagcgagcaaacattacgtgaattgacagccggttatcaagatatccgccatttcttatggattgcgccggatcgtttcgcacccgcatccgccagtcaggaaatgcttgatgagcaggagaatggggtgattcaatgtttccgtttcatcaaagcgctgctgtcactcgggtatggaaaccgaaacatcagctttacggcggtcacccggcagacacagtccgtgtatccgggtgatctcccgcagcctgagcatgcaggcgtacacggtttgatcggttcattggcaaaagaatatccgaactgggacatcaggctgattgatgcagaagaaggcagtgattcgtctgagatgaaaaacatctggcgccttcctccagatccggacggaaatgctgccgcgtaccgtaacggagcttggcacaagcaaaaaacagtccgggtgctgacaagttccgctccgcgtatgtcgtacagagaaggcggcgtttatgctgtcatcggcggagcgggcggcatcggagaagcatggagcaaatacatgatcacccgttacaaagcacggatgatatggatcggcaggcggccgaaggatcaggagattcagagcaaaatagacaggctggccctatcaggccccgcgccgcattatatacaggctgatgctcaagatgccgcagcgcttaaagcggccgtccgttccataagagagcgatacggcaatataacgggagtcatccattccgcgataacgcttgccgacaaaagtatggcgaatatggatgaagcttctttcagaaacgctttttcagctaaggtgaatacgagcgtccgaatgatcgaagcttttaagggagaaccgcttgattttgtgctgtttttctcatccgttaattctttcacaaaaaatgccgggcaaagcaactatgcggcagggtgtacatttcaagacgcctttgcccgccatatcgcttccttgcttgattgtgaagtgaaagtcatgaattggggatattggggcagtctgggcgttgtatcagacccgtcttacagaaaacggatggaggcgtcagggatcggttctattgaacccgatgaagcaatggaggcgctggaagtcttactatcagaaccgttcagccaagcggcattcatcaaagctgctccgcacggcttagccgcactgacggatcaagatgcaatatcggttgtatccggcccggagccttcatttatggaaagcgtcaagcggcaaaatccggatcggaatgaacggcttgagactttaaaacgagaaatggagttgcgcatatgaacagccttctttgcaaactgctcttttatcaattacagtcaatcgggtttttcagcgagcctgtcaccacacctgcagcatccatgcggagcgccggcgtgatcggcacatacggcagatggctggaagaaagcctgaatctattaaaagaaaacggatatatcgcgtatgacggatacacgatcactcttctcgcggatcagcgcccggacggccgcacagtctggaatgagtggaatgcccataaacgcctgcttcccaagggggagcttgcgcaagctgaattggccgaggcgacgataaaagcgatgccttcaattttaaaaggagaacgtccggctacggatatcgtatttcccgattcatcaatgcggctcgttgaaggtgtttataagcataatcccgttgcggattattttaatgaagtgttagcagattccgcggccgcttacctgaaagcctaccttacagaacatcccgatgcccgtatcaggctgatagaagtaggggccgggacgggcggaacgagcgccatgctgtttacaaaactgaaaccatttgcaaaacagattgcggaatattgttatacggatgtttctaaagcttttttaatgcatgccgaacaggaatacggacctgatgtgccgtatttgacaacagccttgtttaatgcggaggagccttgcgaatcacaaaatatcaaaacgggtgtttacgatattgtcatcgccgccaatgtgcttcacgccacaaaaaatatcggtttgacactgcgccgtctgaaagcgctcctgaaatacaacgggatgattttgataaacgaaatcagcgatcgttctgtttttacccatttaaccttcgggctgcttgacggctggtggtcctatgaggatgctgagcttcggattccgggaagtcccggcctatatccaaaatcgtgggagcgtgtgctgcattcggaaggatacagagcggtttgtttccctgctgaaacggctcatgatttaggtcagcagattatcgcagctgagagtgacggactcgtccggatgcaagggatcagagacggcagaaagccatacgccgccccggccgaagttttccgaaagcccgcacagcctgtttcccgcagccgcgcgccagaggagcatcaagctgttaaggctgatggggaatcggtcgcttcccatgtccgctctgtcatcaaaacaagtattgccgatgtattaaaaatgaaagaagaggatattcaggaagaactgaatttctctgaatacggtattgattccattttggccgtcaatgtgattaacgagattaataagcgattgaatcttacactgcagacaacgattttatttgattactatcatgtgaaactgctgaccggttatatctcggcagaatatgaaaccatcatagcctcatctctggagaccgaaagagcgaaaatccgcccggtgcttcaggaagaacggcctgctgaaaaacctttgaagacggatagaaaggaaaacggttatcagaaaccgaaacaagaacggatgccgctttctttcgcaaagtccgatgactcgggaatgttccgggttgtgattgaccgtccgggcggcattgaagatctgacgattgcccgcagtgaagtgcccgagacaaaagatgacgaagttcaaatagccgtccgcgccttttctttgaacttcggagacttgctttgtgtcagagggctgtatccgacgatgccgccttatccgttcactccgggattcgaagcaagcggcgtcgtgatcaagacagggaggcatgtaacatccgtcattccgggtgatgaagtgattgtcggtatgggagaggaatttggctctcaggcgaatctcatcacatgtaaagaacatcaagtctatcataaaccggcccggctgacctttgaagaagcatgcgctcttcctaccgtggcagtgacaatgatagacgccttccggaaagccggacttaaaaaaggcgaaaaaatattaattcagaccgcgacgggaggaacggggctgatcgcggtgcaaatggcccggcatatcggcgcggaaatatatgcaacggccggatcacagaaaaaaattgagtatctgcattcgctcgggatcaacaataccatttgctatttggaagaagattttgaaacggaaatcatgcgaatgaccggcggccgtggggtggatgttgtcattaataccctggccggtgatgccatgcaaaaaggaatgaattgcctggcgccgggcggaagatatatcgaaattgccatgactgcgctgaaatccgctaaatcagtcgacttgtccgtccttcataacaatcaatcgtttcacagcgtggatttgcggaagctgtctcttcaaaatccggatcaggtcaaggactatcaattggaactgcagcggctggcggaagagggagtcattcagcctgtcatctcaaaaatcttttcctttgaagacataaaagaagcgtatcactgtctggatgaccgcggaaatatcgggaaaatcgtcatcagcgtttctgagccgtatcaaatgacgtaccgccccgaacaaaaggatccggccgaaacggtaaaatcagcagctgtgttacctgaaaaagaaccgatcgcgattatcgggatgagcgggcggtttgctgaatcggagaatgtccatgagttttgggaaaacttagccgccggacgggatctgattaaaaaagcagacagatgggctgtctctgacagtcaatgccagtatggcagttttatagagggcattgaatgttttgatcccgttttctttcatatatcgggacgtgaagcaacctatatggacccgcagcagaggctgtttctggaagaatcatggaaagcgcttgaagatgcgggatatgcgggagactcggtaagaggccgggaatgcggcgtgtatgccggctcctgcggcggagattaccaggccatttttaaacagcaggggcccgcgcaggctttttggggcaatcacaattccgtcactccggcaaggatcgcctatcaccttaatttacaagggccggcgatcactgttgatacagcatgttccagttcgctgacagccattcatttggcatgtcaggggctctggacgaaagaaaccgaaatggcggtggcgggcggggttttcattcaatccactcccgctttttatcagtcgtcaaataaggcgaatatgctgtcaccgaccgggcgctgccatacgtttgatcaaagcgcggacggcttcgtgccgggtgaaggcgtgggagcggtggtgctgaaacgtcttagcgacgccgtcagtgacggagatcatgtgtacggcgtcataaaaggctctgcaatgaatcaggacggcgctacaaacggaataaccgctccaagcgcgctttctcaagaacgattggaacggcatgtctatgatacttttcacattaatccggaaaccattcaaatggtggaagctcacggaacgggcactgcactgggcgacccgatcgaattcagcgccttaacgcgcgctttccgccgctatacggataaaaaaggatattgcgccatcggctctgtgaaaaccaatctcggacatgccgctgcggccgcggggatggccggattgtttaaaatcctgctgtcgctgaagcatcggcagattccggcttccctgcattttcatcaagccaatcagcatattcaatttgcggacagcccgttttttgtgaatgaaaagctgataccgtgggaacggaatccggatgcaccgcgcagagccgcgatcagttcattcggattcagcggaacaaatgcccatcttgttattgaagaggcgccgcaaaccgtgcgccggtcaccggcaaaaccggcctgcctcattcctttatctgcgcggacggagcgtcagctggaaattcaggcagaacgcctgctggattcactcagcaagaacaaagacagcgatctgggaaatataagttatacgctcctgctcggcagaaagcatctgcatcaccggtttgcctgtatcgtaagcagtgcggacgaactgaagcgggtattatcggagtggcttgtaaaaagagagcttccgggtgtgtttgtgtccaatttgaaggaccagaagccggcagacgaagccggaatgaaaacattcggaatggaatgcattgaacagtgctgctcggcggcttcacccgcacagtacagagaaagcctggcacatatcgctgaccttttttgcagaggatatgatcttcctttcacacggctttttgacggagggcaatattataaaacgccgcttcctgcctatccgtttttaaaagaaaggtattgggcggctgatgtaaacagttctttaccaggccaagccatgaaaaagtctgaaacgcaaaccgttcccccgtctccgccacagcctgaacatgaaggtctgatttctctgagtcctttaactgagatcgaaatgacagcgtttgaaccggagacattgcaaaaaccgatcgtcttacagcctttggattgtactgttcctgtccagcagccggaaaacgccgtttccgaagacaatagaacattgcttgaagaattgaggataagcctggcagatattttatttttgtcgccggaagatattgatgctgatgagcctttcatcgacatggggcttgactccattatcggggttgaatggatacaaacagtaaataaaacgtaccacactgagattactgccaataaggtgtatgaacacccgacgcttgaggagcttgcggaatatatagcggggcaaataaagaaacccgagtatgctgaagcggaggaaacagcggtacgtccgcaaatcccggaagcagaaactccccttgccggcatctctgacggcactttgcgcaaagagcttaaagaaagccttgcggacatcctgtttctgaagccggaagatattgatgagcatgaggcattcattgacatggggctggattctattatcggtgtggaatgggttcagtctattaataaaacgtatcaagcgtctattacggcaaatctggtctatgaatatccgacaatcgcaaaattagccgggtatctgaccggttccgttcaaaaagacactgatgaagtacatgaggaacatacgaaacaaaacgatatatcagaagagacagatgatcaagaaccgcccgaactgatctgtcttaacccggggggaaagggaagaccgattttctggtttcattccgcgctgggggcagtggagctgtaccagcctgttgccgaacggaccgggcgtcctttttacggaattcaggcaagaggatggatgacagaccgggaaccgatccgcggcattaaaaacatggcggaatattacgttaagctcatacgtaccgtgcagccccggggtccttacgatgtaggcggctattcattagggggcatgctcgcttatgaagtcacccggcaattgcagctggctggagaaaccgttgagtcaatcgtcatgctcgactcctttgactcggcgggtgcgcgggaaataaacattcctgatgaattatttgataaaaatatgatgctgcagacggtgaacatggctttatttgcaccgatctatcaacatccggaacgcatttctgaaaccttgattcaccgtgatgaactagatgccgatcttcatgaagacatatttttagagcaattaatagcaaaagccaaacagcgggggttaacgaagacggacgcgttggtgaaaaatctgatcaggcagaatataaacgttcaggacgcttacgaaatcactgattacgaactcctgccgcttccggatccgaacggggtgacatgctattatttccgaaataaaaacggtattttcttgggtgagcttgatccgtattttacgatcagggccgatattttatccgctgatttcgtcaactactggagccagtggcaagagcatatgacaaacatcgccatcatggatgtggcggtatccaaccatatgacgttattggctgaagacagcgcagccgaaacgatttctgaattttgcggcgttttatattcggcagacggaatgacagaacacagctttctgaaactgcaggaaaagatactgaacgtgcatggtgagatgctgaagcagcccgccaaaataagaccgtaaattcacatatccgcccgccgggtttactcgtaagctttggcgggtcatttcaaatcttggacacatcttggaggaatgaaaatgaccagtttaacaaaaatcagacagcagcagccgtacaagtggtaccaaacgatgagagaaacctctcccgttcattacaatgaaaaggaagattgctgggaaatcttcacctatgatgaagtgaagcgggtgatttctgactacagtcatttttcttccgatcataaatacttaagtgcggacaagcaggaaaaaatgatccggcatattaacaaagacagccttttgaaaatggacccgcctgaacacaccgtcttcagaaaattggtcaatcagccgttcatgccgaaatcggttgagtctcttgcaccgcgtatagccgctatcgctgatgacctgcttcaggccgtccgttcaaaaggcaggatggacattattgaagattacgcatttccgcttccgattatcgtgatcgcagagcttttaggatttcctccgaaagacagggatatctttaaaagctgggtcgaccaaagccagaatgtaaaagatgaaaagaaaatgaatgaagtgcaaaagcagatgatcggatactttatgcagtttattttacagcggagaaaacagccgcaaaatgatttaatcagccatttaatttcagctgatttagacggagagccgctgtcagacaagcaattaatcggtttttgcggcttgttgatcgtcgcggggcacgtaacgacggaaaatgtgatcggaaattcatttctcagtctcaaggagttcccgcatattctgccccggctgcttgaaaataaggcgctccttcctgactttattgaggaagtcatccgcctcagaccttccattcagcgggtaacccgctacaccgcggttgagagcgagattggcggaaaaacgattccggccggagaaaaagtatatgcgtggattggatcggcgaacagagatgaaaagaagtttgaaaatgccgatcagattgacttgggacgaaagccgaatcagcacctgtcattcggtcagggcagccattattgcttaggagcgccgctggcccggcttgaagcgaaaatcgcgctttcccacttttttgaacagatgcccgcatggcgttttactgaggatcaagagccgaatctggttccgagccctgtatttcacggcgttgacaggctgcttgttgagttttgaacgaaaaaataaaagaggcttcgcgggaagcctctttactctgggggcttggagaaatgaatgtaggaatcgaagcaatgaacgtgtttggcggaaccgcgtatgtagacgtcatggagcttgcggaacatcggaacctggataaaaaaaggtttgagaacctgctgatgaaagaaaaagtggtggcgcttccgtttgaagatccgattacgttcgccgtaaatgccgcaaaaccgattatcgattctctgtcagaagaggaacggaatcagattgaaatggtcattacctgtacggaatccgggattgattttggcaaatccatcagtacatatgtccatgattatttgcagctgaagcggaattgccggttatttgaggtgaagcaggcttgctattctttaacggccgggtttcaaatgggcgtgaatttcatcttgtcgcaaacatcgccgggagcgaaagcgctcatcatcggaacggatatttcccgctttttagtggctgaaggcggtgacgcgttgacggaggaatggtcctatgccgaaccgagtgcgggggcgggagctgtcgcgcttttagtcagcagcactcctcatgtctttttgcttgatcaaggtgcaagcgggtattacgggtatgaagtcatggatacctgccgcccgattccggatagtgaagcgggggatgctgatctgtcgctcatgtcttatttggattgctgtgaaaattcatttcaggaataccgaaagcgtgtgagcggggcggattataagaatacatttcaatacctttcttttcatactccgtttggcggaatggtaaaaggagcgcatcggacgatgatgagaaaattggcaaaggctaagccgcaggacattgaagcggattttcagcaacgcgtgctgcctgggattcaatactgtcagcgcgtcggcaacatcatgggggccaccgtatttttatctcttgccagcacgattgataacggctcttttgaaacgccgaaacgcgtcggctgtttttcatacggttcgggctgctgctctgaattttacagcggtgtcgttatgccgcaaagccgtgcgcggcagaatcaatttcagatcagccggcatttggatggacgcgtccgtttatcgatgactgattatgaccggctgctccaagacagcggcatcgtaaaattcggcacaagaaatgccgcgcccgcagcagacatcccgaatgcgcatcaaggaaaaacgcgattagtgctgactgaaataaaagagtttcacagaaagtatgaatggacgacctagtataagagccggaaaggcttgagtatttttaaagaaacggagaatacacatgaatccaatgattgatgtacaggaaacagaaccgggcattgtgcaggtcacaatgcaggatacggccgggaaaaacgggctgtcagaagagtttgtaagagagctgcaccgggtattccaagacatcaatgcccatccgtcctataaaactgtccttctgacgggttacggaaattatttctgcacgggaggaacgcaggaggggcttttgaccattcagagcggaaagcttcaatttacagatttaaagcttcacagtcttttattggattgcaggatccctgtgatttccgtcatgcaggggcatgccatcggagctggctttacgatcggtctgagctcggatttcgtcattttaagcagagagagtttttattcttgtaattatatgaagtacggatttacaccgggaatgggcgcgacgtatattgtgcctgaaaaactgggaattgtcctcggggaagaaatgctgtttacggccgcgaatttcagcggcgccgctctggaaaaacggggtgttccgtttgaagtgctgccgaaaaaagacgcccttcaaagaggccgcgaattggcccggctgctggcggataaaccgagagcctcactggttgcgctgaaaaccaatgtgaccgcacggatcaaaagagagctgacaaaagcggttgaggaagaggtaaacatgcacgaagccacattccatcttcctgaagtaaaagagagaatcagccgcttatacggcagttaaacagaatgaaaaaagcatgggatgcccccatgctttatgactggtccgtcttttgcagaacggagcctgcgaattgttctttaatttcggcgctccgggctgcggtttctgcgatgcagtgcatgatggcttcttcaaagcggcgctcgtctaatgcgcgaaggcctgcttcagtcgtgccgcccgggcttgtgatttccttacgcaggcgttcaggccgtttgctgcttgttctgagcatttccgtcgccccggccatggtttgtaaaatcagctcttttgccgtttcttccggcaggccggcttgaagggcggccttttccatcgcttccacataccggtacacataggcgggaccgcttccggcaatggctgtgacggcatcaaggtgtttttcttcaaagagcgtcgcttctccgattgtttccagaagctcttttgccgtccggatttcagcttcactcgcctcggagcttgcggaaaaaccggtcgccgattgctgaatggccgcggatgtattcggcatcgcccggatgatggtgagctttctgccgaaatattgctgaatcgtgtgaatcgtcagccccgcgatgacagaaatcacaagctgatctttcacgtattcgcgaatgttctcaatgctttctgccgcatctttcggtttaaaggcgagaacaataatgtcggtattgctgaaaaactcttctttatcccggcacggtttcactccgtacgttttttggagctcttcaagccggctgtcatttgaccggtttgtcatatatatatgtccgggggctgtcattccgctttgcagcagtccgttcaccattgcttccgccattgatccggccccgataaaaccgattttcttcatataaatcctccttcttctaaaacacaaaaaaaccttcccgtcaaaaaggacgaaaaggtttcgcggtaccaccttacattagcacgaatcagccgtgctcagctcaaatcccgtaacgagggatacgtttaggttttcctaaccgctctgagggcaggttctgtaaacaagagggccgcaatgtctttcagccggggacattgctctctgctgccgttgtttatatactagttcctcgtcatcgcgttccgtgttttctagtttgttgttcattatgctatgcgaaagagcgggatgtcaatctttttttccgatatgcgcaataatgacacagtgaaaagaaaacgctaaaatatgattattcaggaatgaaaagaacgaaggagcgtaaacatggcagcgagaaagatcattccgatacgtgtgccgactccgtttgcagtcggcgacgttatcgtttatttaataaaagatgaagccttaacccttattgactgcggcccgaatacaaaggaagcggctgaatcgctctcatttcagcttaaggaacacggcgtttctgcggcggatatagaacaggtggtgctcactcatcatcacgcagatcattcaggtctgctgcaccttttttccgaggatacggaagtgatcgggcatccgctgaatgacaggtacattactcaggatcagtcgtatatcgcccggcaggaggacttttttctgtcgcttatgactgaaatgggcgttcccctgacgcctgaagacatacagaaaacagttaagctgtcgtacttattttctgcaaaccgtctgttaacgaaaacagtggaagaaggcgggaaaatcgacgggcttaacggctggacggtgctcgaaatcccgggtcatgccgcttctcacattgcgctctaccatgaaaaaagcggtgaaatgttcagcggcgatctgcttttgtccaacagctccaccaatccgattctggaagctccggaaaaggggggcgtgcgcgcggccccgatgctcgactacttgaactcaatgaagcggctgtatgacgtaaacccgtcccttttatatccgggacacggcgatctgctgacggacgtaaagcctgcttttgacaggcggcttgaaaaacagagaaaccggtcggaatatgtgctgcgcctgttgtcagaggaaacgctgacggctttccaggtatgccggcggctgtttccggctgtgtatgaaaatgaattgtttttaatgatgtcagaaacgatcggccatcttgacgtactggctgcaaaaggggaggctgaatcctttcagtcgggaaatactctgatgtttaaagctgtgaaggggtgaaggaaatgggcagattaacggataagcggatttggatcaccggagcatccggcggactcggagaacggcttgcatattcctgcgcggcagaaggggctcatgtttttttatccgccaggcgggaggaccgcttgcaggaagtgaaaaaaacgattaccgcgcgcggcggacagtgtgatgtcattccgtttgacgtccggcatgcagaagaggctgaaaacgtaaggcgtttgatcggtcatgttgacgtattaatcaacaacgccggcttcggtatttttgaaacagccgctgattcatctttggaggatatgaaggcaatgtttgaagtgaacgtcttcggattaatcgcctgtacgaaggcctgtcttccggtgatgcttcatgcgaaaagcggccatattatcaatatcgcctcacaggccggcaaattggcgacgccgaaatcaagcctttattccgctacgaaacacgccgttttagggtattccaatgcgctgcggcttgagctggccggtacgggtgtagccgtgacaacggttaatcccggtccgatcaaaacagacttctttacaattgcagataaagagggcggttatgtgaaaagcgtcggcagatggatgcttgatgccgaccatgtggcagagcgtattacatccgtaattctgacggataaacgggaaatgaatcttccgcgatggatgagcctcgggacgaagctgtatcagcttttcccttcgtttacagaaaaactggccggccgcgcattaaagaaaaagtaacaagggggagaaaggaatgtccgacctggatatacacaaggcattgatgacagagcctttagtcaggcaaatggcagaggcgcgtgaagtattttggatcaacccgcataaaaccgatgatccagtaaagaatggcgctgaatggagaaaggagattgccgaagcggaagaaaggctgcgccggtttgcgccttatatcgcgtcggcttttccggagacggaagcggcgggaggcctcattgagtctccgcttgtcttcatcaatgaaatgaaaaagcgtctggaacaaagcgccgctcaggctttccccgggcgtctgcttttgaaatgcgacaatgaacttccgatttccggttctattaaagcgcgcggcgggatttatgaagtgctgaagcatgctgaagatctcgctttaaaagcgggaatgctctcaacagacgatgattacagcatattgactgaggaacggtttaccgcttttttctcaaaatactctatagccgtcggttctacgggcaatttaggtctgagtatcggcataatcggcgcgaagctcggcttttgtgtgaccgttcatatgtccagtgacgcaaagcagtggaaaaaggagctgctccgggaaaagggggttcgcgtcatcgaatatgaagcagactacagtctggctgtcaaagaggggcgcatgcaggcgaagcaggacccttattgttattttattgatgatgagcattcccgggatctgtttctggggtatgccgttgcgggaagccgtgtgaaaaagcagctcgatcaaatgaacataaagccgggtgcagatgaaccgcttttcgtttatttgccgtgcggggtcggaggaggcccgggcggcgtcgcgcttgcgctaaagctgatctatggcgggcatgtccatatttttttcggtgagccgacgcattcaccctgtatgctgttaggactgttttccggcttgcatgacggaatcagcgtgcaggatatcggccttgataatcaaacagccgccgacggacttgcggtaggaaggccgtccggactggccggccctctgatggagcctgtactcagcggctgttataccgctgatgacggcacgcttttttcactgctttatcaattaagagcggccgagaataagagccttgaaccctctgcactcgccggtatggccggagccgtcaagttcgttcagaccgaagccggtaaccgttatataaaagagcgggggcttgagatggaaaatgccgtgcaccttgtgtggggtaccggcggaagcatggttcccaaggaggaaatggaagagtacagccggatcggttcctcatttgtgaaaaaaatgggcagacagtgaggcggttttccgttacaatctttgtaagcgtttgttttttaatcggaaagccatacagagagattggtgtgaattgtgaaaagtaaagaattgaacttacatacattgtatacgcagcacagccgcgagtcgtgggccggattcggcggccatctttccattgccgtttcggaggaagaagccaaggccgtagaggggctgaatgactacctgtcggtggaagaagtagaaacgatttatattccgcttgtgcgactgctccatcttcatgtcacgtctgccgcaagacggaatcagcatgtcaacgtgtttctgaaacatccgcattcagcgaaaatcccgtttatcatcggaatcgcgggcagcgtcgccgtcggcaaaagcacgacggcgagaattttgcaaaagcttctttcccgtctgccggacaggccgaaggtgagcctggtgacaaccgacggtttcttgtatccgacggcggaattaaaaaagaaaaaccttctgtccagaaagggatttccggaaagttacgacgtgaaagcgctgcttgagtttctgaacgatataaagtcagggaaagagagagtggaggcgcccgtatactcccaccttacctatgacagggaagagggtgccgtcgaggttgtcgaaggtgcggatatcgttattatcgaaggaatcaatgtcctgcagtcgccgaccttagaggacgacagggaagatccgcggatttttgtatcggatttctttgatttttcgatctatgtggatgccgaagaaagccggattttcacgtggtatttggagcgtttccgcctcttaagagaaaccgcttttcaagatccggcttcttattttcataaatttaaggatttgtctgatgcagaagcggataccatggccgcctccatctgggagagcgtcaaccgtccgaatctgtatgaaaatatcctgccgacaaaattcagatcggatttgattttgaggaaaggtgacggccataaagttgaagaggtgctggtaaggcgggtgtgatgtgaggaggaagcgaatattatgatgcatcatattgaattgtatgtatctgacttgaaagcctccgcccggttttggggatggtttttaggtgagctcggttatagggagtttcaaaattgggactccggcatcagctggaaaaacgccggattttatgttgtgcttgtacagacagaggagcgttttttaacaccggagtaccacagatgccgggtcgggctgaaccatctggcttttcatgctgcgtcaagagagcaggttgacgggatgacggaaaagctgcttgccagaggatgccccgtgctttacagggaccgccatccatatgcaggcggaagcacgcattacgccgtatacacggaggacccggatcggataaaggtggagctggctgcgcctgcttctgaatgaactataacttctcgtttttttcttcgcgcagcgcgtcgagtttcttttcgattctgtccaattgtatgcggcgctgcttcaagcttctgaatacgtatatcacggcaaacaggaaaaatgcggctgcaataaatgagatcaattgaaaaatgacatcaccgatgttcatcttttttacctccgtgtgcggcgggcttcttcagcccgccgttttttcattttaaccgatgtgaagacatgggggatgaatcatttctctcctagctttgtttctttctgagaatgaatagtttctgcatatggcttatgatcacttttgcggccgcatatcccggaatggccagcagcatcccggcaattcctgagaatttgccggcggcaagcagaagaaaaataatggtcagcgggtgaatgtccagcttccgtcccataatttgcggggaaatcagctggctttcaagctgctggacaatgacgacgaccgtaatcaccagcaccgcctcggtcggtgaatcgaacaatccgacaatgactccgggaaatgtgccgatccaaggcccgataaacggaatcagatttgtcaccatggcgaacgcgcccagaacgagcggataatcgagcccgatgataaaatagccgattgtgacgagaacgccgacacagaaactgacgagcagctgtccttgtatgtatgaactgagagcttcatccatatcccgcaggatttgttttccttctttttgatgtttttccggaagaagccgcagcagtcgccgggggctttatttccttcttttaacatgtaatacagcgcaaacggaataatggctgcggtgatggcggcattggcagccgtaccggccagactgctgagagaatcagcgattgaaccggaataatttgcggctttgtccgctaattttttaaaggaatccccatgctgaagcctggaaaaccatttgctgtcctgaagatgcccgatccaattttcagcttttgcggaaagctccggaatatggtctgtgaaggctgtaaactgtttttgaacggcagggcccgccgtataaaggaagaggacaaaaaggccggctgttcccgcataaatcgctaaaatcgcgattccttggggcagctttaatttcgcatgcagcactctgacgagcgggcggcacaaatagtaaaggacacccgataatacaatgggcggaaacaaggttttaaccgtaatcacaacaggctggaacaaaaagtctattaatgttccgagataaatgatgagaaataacagaagaacggcatagccgatcttgaaataaggcccgacaggcatatcctgcaccacgcaatctttagggtttactctcggacgtttcccttttcgcccggtgcataaacgtccgtgtcaggaaaactgcccctgattggtgacgtaatcgtagataatatcttctacatgggcatggagatcctcatcgggttcttcattccttctttcttctaaagctttttttaaactctgtttttcataggggctcagcggatctgtcgacacattccgtccatactggcggagggcttgtcccagcattttttctataaattgatccatcatatattctcctattcttgtcattcatctttattctactaaatatcatgtgatcctcccactcttctatcatattttctgtcaggacgatttaggcttttattccagttcagccgagagaataagatgaaacggcagcgttaacgcatcttcatcgtttatgatttttaaacgtttttcgtcatgcctcacttgtttcacccatccccaaaagcggcgggggccgcgtgctgaagcataggtgaccgagatggctctgtcttcttcaatcgacgccgcaatgatgcggttcatgtcgttcagttgctctgcgctcagttccggaggccggaattcccgttcttttcgtttttttgcaagcagctgctcccgatgttcgggcagcatcatccggcttgattcccacatgacattatacccgggtgttaatttgttcggattcatgtatatcacctcaattatttgtaatgcccgccgattttttcagcccggtgaaaggcttggccggcctctgtcagcgaagcggcatggaggagcgacgcagggccgtaccgctcatgaatatcatccaatactttgccgagactgatctttttttcctgagcatcaaacaggctcagctgaacataatcacagggctccagctgggaaagggagacgccggcgctgcggacgggctcaccgttccaatgctctttgaagagcttgaccgccgctttaaaaatatccattccgaaattagtcggagagaccagctttctctgtctgtgaaaacctgaagggaattcaaaatcagcgcctctgatgctgaccgaaaccgtatggccgatgtattgtttgaaacgggcgcggcgggccacttcttcgcttaactccaacagcacgactttgatatcctcaaagcggctgtagtctctcgggagggtcatgttatggccgatcgctttttgccggctgtgcgtgttgacggtgaccggagagggatcgatgccgcgggctgtccgctgaagcaattcgccgttaatgccccagcgttttttcagcagttcggcggggtgcccggcaagcccgccgattgtgctgatgcccatccgtcttaaatgatgctccatccgttttccgatgccgaataattttccgaccggcagcggccacagatcctccctgatatttgacatatccaatctgtggatgccggatgcgttttttttggcaaaatggtcgcaagccattttcgcgagcgccttattcggcccgatgccgacacgggcataaattccgaattcacgcataatcgcttgctgaatgctttcggcaattgtaaaaggatcaccgaacagccgcctgcttccggtcacgtcgagaaactgctcatcgatggagtagggttctacaagatcggtataccgttcaaacagttcggtaatcatgacggatacatcaatatactgctgcatccgcggacggacaataacggcgtcgggacatttggcctgcgcttcccacagccgttcggcattttttacgccgtatcgtttggcgagcggacaagccgcaagcacgacgccgctgcgtctttcgggatctcccgagacaatcacgggccggcttttgagatgaggcgcttccgctttttccacagacgcataaaacgattgcatatcaacaagaagaatatcagccataaaaaaacctccgggaacgtttgttctgtttttcattgtacccgaacaatgatcacgtttatactggtaaatcattccccggctggaagacgtgctgattcgtttgcttgaaaagaaatcatttacaattgcaaacaacccacatataattttttatattccaatgagaagagctgacattcattttgccggacgaaaaggagagtcaatcgataatggatattcgaacaattacctctgaagactatgaaatggttacgtctgttttgaatgaatggtggggcggcaggcagatgaaagacaaactgccgcgcttgttttttgaacattttcaggacacgagctttatcacgtacgggccggagggaatgaccggttttttaatcggttttcagtcacaatcagaccctgagacagcctacattcatttttccggtgtgcatccggatttcagaaaaatgcaaattggaaaacagctctacgatcgatttatggagacggtgaaaaaaaggggctgcacaaaagtcaattgcgtgacggcgcccgtgaataaagtatcaatcgcttatcatacaaaattaggctttgaagttgaaaaaggaaccaaaaccgtaaacggaatccctgtttttgcgaattatgacggtccgggagaagacagaattctgtttgtgaaatatatgtagagggggatgaatatgggttttttagctgacacgcccaaaccgccctattatgcggtcattttttcatcaataaagggaaaatatgatgaggaatatgagcatacggcagagcgcatgatgaatttggcaggcggacagccgggctttttaggcgcggaaagcgttcgggaggaaaacggctgcggcatcacggtttcctactgggacagcctggaggcgattaaaaggtggaaagaccatactgaccaccgggcggcaaaacaaaaaggaaaaagcgcctggtatgaagcgtacgcggtccgcattacgaagacggagtcacagcggatgtttgcgtcaaaaggggcggaagattgattacatttttacggcatacacaagaacagacggcgcgggaaattgcggcggttcaacgctgctcttatcaaaaagaagccgagctgatcggctttttcggcattccagccctgcatgaaacacccggtgacatacagcggtcacgggagacgtttgccggtttcagagaaaaagatcggcttgcaggcgtcatttcgtatgaaaaaaaaggatatgaccttgtcatatgcaggctgacggtgcacccgtccggctttcggaaaggaatcggacgggcgcttattcaatttgtgatcgaccaaaaccgggacgcccaaaaaatagaggcggctaccgccagtcaaaacgttccggcagtctctctctatttaaaaaccggcttcacagaagccggacagacagagacgccggaagggctgaccctctcgttttttcatctttatccgaagaggaaagcggaagttgttccgtacaagccggaatggaaagagatgtttgaaagagagaaggcggacttgatccgaatcttcggccccgcacttcattctgtcagccatatcggcagcacctccatcccgggaatggccgcaaaacccgttatcgatatactggcggaggtcaaagatatttcagatgctgaccgattcagcccgcagctggaagcactcggctatgaggcgcaaggggaaaacgggatagagggccggcgtttctttcaaaaaggcggcagcaagcgcacacaccacgtccacatatacgaaacaggccatccggatgtgaagcgccatctgctgttccgggattacctcactgaaaagcctgaaaaagcggctcaatacatggaactgaaacggcggctcgctaaggcatacccgtacgatacggcaaagtatagtgaagggaaaaatgactggatcaaggcggctgaacaagaggcaaaggactgggagagcgggcttctgtaaagaaagcagaaacaatgcatacagcggctcggtatgctacaatggcgaaaatgaaaaacggaggatcatctatgcaaatacatgtgacggatgcggcgaaacacacacttcagcaggcgatggacgccaacccggggaaaaaagcgcagctccgctatgacgcagaaggctgcgggtgcgcggtgagcggcgtgccgaccatctggctggcggacgaattaacgggacaatgcgaagccattgaaaccaacggacttccgctttacatccagacctcacaaaaagtgttttttgacgaggaaatgacaatcgattacaatgaaaaggcaaaaacgctcgtcttaaaaagcccggcagagatgctgagcccgagaatgagcatattagtaaagcagggagaaacggaaagtgaatcaaaagctgaaagccattaaacagacggcacagcataaaacgtgggtatcctttctgaacaacaaccacccgtacagtctgctgcactggtccatcggaggcgctgaatccgttcagaaggatgtctggctgcttcaggatgagatgaccttcaaagcgcaggagtttacgacaatcgacctcgccattgactggatcggagaaaatatggacgggattaccgacgttttatgacgggaaagcgaaagaaccagcatacgttctttcgcttttttacgtttgcgtcatggtatctaaaaaggtttgaacggctttgcggtagctctccggatttttggtgtacgacatggcatgcccgcccgattcggccagatagagcatcttcggtccgcgttttctgcggtgcagcaattcggaagaagcgggaggtatataatcatcttccttactgtgaataaacagcacgggctgccggtcggctgataaccgatagaggcgatacatcacggatacggtatccttctctcatccgcaaaaagaaatcagccaaaggcagaagcggccacggaggcagccggaactcccgcttcagtctgtaggcgagctgatcgcgaaagcttgcgaacggacagtccgcaatataaaaatcagcgcctttttcatcctgatgcccgcccgcgtataataaggccgtcaccgctcccatcgattccccgtggatgccgatttgaccgccgtctcccgttttgtgtctcacccaattcacggcttcttccaaatcatctttttcaaaatagccgtagctcgtcgttctgccgccgctttttccgtgcccgcggtggtcatatacgagcacattccagcctgaatctaaaaataaatccatgtatttcaatgaattgaacgaatttacggtaacgccgtgacaaataatcatggcgtttgccgtatgatgcggggcgacgtaaaagcctttgatctcatacccgtggcgtgacaggatgacggcctcttctttttccatggcctgaaaggaatcaaatctatcatgcccgtccgccgtttcttttttcatgatatcttcatccgtctttttcttcataaacataatgagattcgtaaaagcgaatccggcagccaaaaagactgcgcaagccgaaccgaacaccgccagccattttttcacacaggggccctcctttcatatgaaaaatccttcctccggcttttcaggaccgtgaacgttgccggcctccggcgctccgtggtacacttgcttcaccatattcagatacggggggcgtaatgatgaaaaagcagctgcctaaagaaaaacacagcttaaaagacgatctggaggaagatctgaaggccaggcttttgcaaatgaaaagtgagctgaaggaagaagacgagaaaaaacaggcgcagcaaaaagcggaacaaatcagaaagcgaaaagaaaaagaaaaacataaaagctttgaagagctgctgaatgaaagcagtctcgattggcacaaatataaataaaccggcatctgacaaggtgccggttttattgtttaagaacgatgggcttcgtatacgtcccgttttgtatggtattgcagggctttgatttcctggctgcttaaacgccgggcctctgcagccgaacagttttctctcagctgctcaagtgagctggctccggtgatgacagaagcgacggccggctgtgacagtaagtattgaagggaaagctccgtcatgctcaagtcaggtgcggcagcgccgatcgcttttttggtttcttccaattctgcaaaagaatatgttaaatacccgttctcttttacgcttgcggctgcttgatcaagcggtttttccgtaagaagccctttagcgacaggccctctggcgactacgctgattccgttctcctctaaaaggggaagccactcctcaggacgccggtccagcaggctgtattgcatcataacgcttgagatatttgattttttcacatattctttaatgacattcggacgaatcgaggaaatgccgtaataccggatgacgccttcctgttttaagtcctcaaacgcttcgatcgtttcgtcaatatgatcttccatcgtgccgccatgcagctgataaaggtcgatatagtccgttttcagccggcgcagactgtttttgaccgcttcttttatgtatcctttggaggcgtcccaatgccagccgtctttatcatcattccagcggtttccggctttcgtggctaaaatgatgtcgtgcctgcggtttttgacggcctccccgacaatttcctcatttctgccgaaatcataaagatcagcggtatctaaataattgattccaagctcgatcgcttcatccaaaatagacagcgcttcagctttatccgtgcccagcgacatacagccgagcccgatttcgcttatttctaaatcagaatgtcccagtgtgcgttttctcatcgtttcgctcctttttatagtcttttattgaccgtaatataaaggcgcgaagttttcaactgttaaggcccggtgatccaatctccgacatagcggaatgtccgtccgtattctttcagtttagcccgcacttcccacgcctttccgaccaatacgatacttttatccttccggtacaccttcaatcgaaaagcacctccctctcatgcatgtatgataaaatatatgaggcataatagagagacagaacgggagatgacatgatgaaacatttagaagaaaaaacacttgcgaaaaaaaagctgtatgacgggaaagtcatagatctttacttagaggatgtagagctcccgaacggaaaaacaagcaagcgggaaatcgtcaaacatccgggagcggtggccgtacttgcggtgaccgaagaaggaaaaatcattttggtaaaccagttcagaaagccgctggaacggacaatcgttgaaattccggccgggaagcttgaaaagggggaagagccggaacatacggcgttaagagagctcgaggaagaaacgggatatacggcggaaaccttgacgaaaatcaccgctttttatacatcacccgggtttgctgatgaaatcgtgcatctctttcttgcggaagggctttcgccgctggaagaaaagcgcgaactggatgaggatgaatttgtcgaagtcatgcaggtcacgcttgaagaggccgtgaagctgattgaatcccgcagggtgtatgacgcaaaaacggcgtacgcgattcagtatctgcagctgaaagaagcactgaaggaaaaatgatgaaaaccatctatgcggatctgcatattcatatcggccgcacctatacgggaaaaccggtcaaaatcaccggggccaaaacgttgacgctgcatcggattttagaagaggccagtgaggggaagggaattgaactattgggcatcatcgactgccattccccggaagtcatagaagaaatcgagcgcggaattgatgaaggcagataccgtgagctgaaagaaggcggcatccggtatcggaatacgacgcttctgttgggcagtgagcttgaaatctatgatcacacatgccgcgggccgattcacgttctcgtctttatgccgtctcttgccgaaatgaagatgttttctgagtggctcgcaaaaaggcttaaaaatatccatctcagttcccagcgtatttatgaaaccggtttgaatcttcaaaggaaaacaaaggaattgggcgggctgtttattcccgcccatatgttcaccccgcataaaagcctgtacggaaaaggggtcatatcttctttgacagaagttttcgacccggcgctcattgatgcggcggaactcggattaagctgcgacaccgacatggcttcgcgggtaacggaacttgatccgtatacatttttaacaaattctgatgcgcattccttaggaaaaatcggcagagaatataatgaaatgcttcttaaagaagcgaatttcacggaattttcgctggctttaaaagggaaggacggaagaaaaatcacggcgaattacgggctgaacccgaagctcgggaagtattaccggacggcttgcgaccgctgcggcagcccggttgaaaaaggagcttccgcctgtccggagtgcggggggaaaactatgacaaaaggggtcagtgaacggctggaggaactgagcggcccgaaaaaaagccgcgtgccgcggccgccgtatattcatcaaatcccgctgcagttcattccgggggtcgggccgaaaacgttagacaaactgaagcgggctttcgggacggagatggcgattcttcatcaggcgcaagaagaggaattggcgcatgtcgtccagcctaaaatagcggctgtcattcataaagcgcgcaccgggcagctcgtccttgaggccggggcggagggacgtacggcagaatcaagtcgtaaaagccggattttagcggagctcctcctgcaccttctttttcgtgcggacaaacgcaatcaattcgatgatttcatcctgattcagcggctgtccgtcaacggtcagtgtgccgcggccttgtgcggcgtttgttaattcgatggtctgggtaaacggctccgcctttttttcagtgcgccccagtaaatcgtcgcacgtcgtgtcaaacagatcggcaagcgtgcccagcgcttcgaatgacggacgccggtatcctgattcatacccggcgtacgtgcttttggcgatgccgagacggtcagccgtatattgaagagaccaatttttcttttttctcagttcagttaaacgatctaaattcatattcaaaaccgctccttttcacttgagcaaattatatcatatcgatatgcaaaagtgtacgcgaattgaataataatcacttgattaatttcaatcgtctgtctataatttgattaaaagtatgcgaaaagcgaatgcttaacacatcttgagaaatggatgaagaggtgcagggtatgaaaaaattattgctgttaacaaccggaggaacaatcgcctcagtcgaaggagaaaacgggcttgcacccggggtgaaagcagacgaattgttaacctacgtatcaaaacttgataacgattacacgatggaaacccattcgttaatgaacatcgacagcacaaatatgcagcctgaatactgggccgaaatcgcaaatgctgtcaaagaaaaatatgacgcatatgacgggttcgtcattacgcacgggacagacacaatggcgtatacatcagcggcactgtcttatatgcttcagcatgctgataaaccgatcgtcattacgggttcgcaaattccgattacatttcaaaaaaccgatgccaaaaaaaatatcacggacgcgatccgcttcgcatgtgaaggggtgggcggcgtatacgtcgtatttgacggcagagtcattcaaggcacacgcgccattaaattaagaacgaaaagctatgatgcatttgagagcattaactatccgtatatcgcgtttattaccgaaaacggaattgaatacaacaaacaagtgcacatgccaaaagacgatgcctttacggtcaatacctcactttgcacggacgtgtgcctgctcaagctccacccggggctgaaaccggaaatgtttgacgcattaaagggcatgtacaaagggatcgtcattgaaagctacggcagcggcggcgtgccgtttgaaggaagagacattctcgccaaagtcaatgaaatgattgaaagcggcattgtcgtcgtcattacgacacaatgtcttgaagaaggagaggacatgagcgtctatgaagtcggccgaagagtcaatcaagatctcattatccgctccagaaatatgaacacggaagccatcgtgccgaaattaatgtgggcgctcggccagtctcacaacttggctgaagtcaaaaacattatggagacaccgatcgcagacgacgttgtactgtaaaaacatgactaccacaaagagaaagtagggttttagcatgacaaacgcgcaaaaagaatatcgtcaggaaaaagatttcctcggagaaaaacaaattgaagctgatgtgtattacggaatacaaacgctgcgcgcgaaagaaaactttccgattaccggctaccgcatccacgaagagatgattaatgcgctcgccatcgtcaaaaaagcggcggcgcttgccaacatggatgtaaaacggctgtatgaaggaatcggaaatgcgattgtccaggccgcagacgagattcttgaggggaaatggcatgaccaattcatcgtcgatccgatccaagggggagccggaacgtccatgaacatgaatgccaacgaagtaatcggcaacagggcccttgaaatcatgggccataaaaaaggtgaatacattcacctcagcccgaacacacacgtcaacatgtcccaatcgacgaacgacgtgttcccgacggcaatccatatttccaccttaaaacttttggataagctccttgatacgatggcgcatatgctgagtgtctttaaggataaagcgaaacaatttgattctgtcattaaaatggggcgcacacaccttcaggacgctgtgccgatccgtctcggacaggaatttgaagcatacagccgcgtgctcgagcgtgacataaagcgaattaaacaatcccgccagcatctgtatgaagtcaacatgggggcaacggccgtagggacggggcttaatgccgatccgcgctacatagaacaggttgtaaagcacctggctgacatcagcggactgccgcttgtcggcgccggccatttggttgacgccacacaaaacactgatgcgtatacggaagtttcagccgcgttgaaagtatgcatgatgaacatgtctaaaatcgccaacgatctgcgcttaatggcttcaggtccgcgcgcgggacttgcggaaatttcactgcccgcccgtcagccgggatcatccattatgcctgggaaagtcaaccctgtaatggcagagctgatcaaccaaatcgccttccaggtcatcgggaatgacaatacgatctgcctcgcttcagaagcgggccagctggagcttaacgtaatggagccggtactcgtatttaacctgcttcaatccatcagcatcatgaataacgggttccgttcatttaccgatcattgtctggcgggaattgaagccaacgaaaaacgtctgaagcaatacgtggaaaaaagcgtcggcgtcattacagcggtcaatccgcacctcggctatgaagcggctgcgcgaattgcccgtgaagccatcatgacggggcaatctgtaagagatctttgccttcaaaatgatgtactgacagaagaagaattggatatcattttgaatccgtatgaaatgacaaaaccggggattgccggaaaagatctattagaaaaataaattttaaagcaacaacagccgccttttcacgtttttcagtgaataggcggttgccatacaaagggatgaggcagtatagtataatttgttatatcatttgatgaaagcgttttagcttttttcttctagggggattttcttgtgaaagaggtcagattgccaaatttattggaaattattatcttattattcgggtttttagcacttgtcttatcgttcacagtgtttttagacctgccgatccagctagctctattaatatcctggtttttcgctattattctcggagtcaggctgggatattcatataaagacttgcaggattcgattgtcaccgggatatcaaacggtcttgaagcggtgttgattctcgtttcggtcggtgcgctcatcgggacatggattgccggcggtgttgtgccgacgttaatttattatggtttagagtttattaatcctcatattttccttctggctacactggttatttgttccgttatgtccgttgcgaccggaacatcgtggggaaccgtgggaaccgcggggatcgccatgattgccatcggagagggaatgggtataccgcttccgatcgtagcgggagccgttttgtccggcgcttacttcggagacaagctttcaccgctgtctgacagtacggtgcttgcctccacgctttctaaggtggatgtgctgtcgcacgtcagagcgatgatgtatctgtcaattccgtcctatattattacggccattctatttaccgtaacgggatttatatacggcggaaaaaatattgatctcgacaaagtggaatttttaaaatcttcattgcagaaaacgtttgatattcatatatggatgctcattccggctgttgtcgtcgttgtccttctgattttgaaaaagccgtctatgcccgttattatcatcggtgctttgcttggcgcaatctgggcttccgtctttcagggaatgaattttgccagtgccatcgcgactgcttataatggtttttctattaaaacggacgtcgaatttttaaacggcctgttaaaccgcggaggcattaccggtatgctggatacgttagtcgttatcctgttcggtctcggttttggaggaattcttgagaagctcggcgtattaaaagtgattgtctcaacttttgagaaaaagctgaccacaccgggaaatgtgacgctttcgacattgatcgtcgcccttttaggaaacattttcggctgtgcgatgtacgtgtcattgatcctgacgccgaaaatcatggagaacagttatgataaactgaaacttgacagaagagttttatcccggaacgcagaggtgggcggaacgcttacttcagggatggtgccgtggtctgataacggcatctatatggccggcattctcggcgtatccacattttcatatctgccgttcatgtggctcagttttgtatctatcggactggcaatattgtacggatacacggggaaattcatttggtacacgaaagaaaaatccttgcaatctcaaaaattgggttaggaggttcatttcatgattacaaagcatatgattcggacgttaatgattgaaacgccgactgttcccggaaatctcggaaaagtggcaaccgccatcggagtgatgggcggagatatcggggaagttgaaaccgttaaagtcggcccgaactacacaatgcgcaacatcacggtgcaggccgaaaatgaggagcagctgcaggaaatcattcaagccattgaagctctcggtgaaggcatccggcttcatacagtctcagatgaagtgctctctgctcatgaaggcggcaaaattcaaatgaaaagcaaaatgccgatccggacattggctgagcttggccgtgtttatacaccgggcgtcgccgatgtgtgccgactgattgaaaacgagcctgaaaaagcgtccatctatacgacaatcagcaattctgtcgccattgtcaccgacggcacggcgattctcggcctcggcaatatcggttctgtcgccggaatgcctgtaatggaagggaaagccgcgctttttgaccagctggcgggtatcagcggaattccgattttgcttgatacctctgatccggaagaaattattcgcacggtaaaacatatttctccggggttcagcggaatactgcttgaagatatcggttcgcctcactgctttgacattgaagaccgcctgaaagaagaactggatattccggttatgcacgatgatcagcacggcacggcggtcgtcacgctcgccgccgccatttccgcttgtaaaagcgccggtcttgatttaaaagaagcgaaggtcggacagatcggtctcggcgcggcaggcgtcgccatctgccggatgtttatggcatacggagtcaaagcggtctgcggaacggacaagtcagaagacgcaatgaaccgcctcgctcagtacggaggtcagccgcttggaagcatcaaagatttaatggacacgtgtgacattgtgatcagcaccaccggagttccgggtctcattaaaaaagaggatgtcagaaaaggacatgtcattctggccttatctaatccgaagccggagattgaaccggaagacgcattacaagccggagccgcttatgcagccgacggccgctcggtcaataatgttctcggcttcccggggattttccgcggcgcgctgaacgccaaaagcaagaaaatcgaccatgaaatgcttgtggcggccgcagaagccatcgcctcttgcacaaaacacggcgatctcgtgcctcagcctttggatgcggacgtgcatcaggctgtatcagcagccgtagaacgggccgcggcaggaaaataaacaactcttacagtaccggacatgtgccggtgctgtttttttagatgaataggaaacggaattcttaggcaggctaacagatagcaaaagacggaataaagaggtgtcaatgtggattattttccgctgatccatacaaatatttgggatgctgtgatcggcgtgccggtcgtcttatgcgttacacagctgatcaaagtgttctgccgggttccgggcatattcgttcccacgattgcccttgctgccggaaatgttgtgtctatcgttttcggtcaccatgaacacgtgtatgcggggattttcatgggatttttttacggatacgccgctatggggagctattcatctgccaaaacgtctctgcgcgcttaccggtcgaaacatgagccgtattcatgaacacatcgggatttttttgttatgataaagaaaaggcaaaaaggagcgattggcacatggcgaagagcaaaacgaaaaaaatgcgggagcatctcagaagaaacgggatgcgtgacgcagtcttgtcaagggggacggcgccgcctttcagcacccatgaaagagtgacgaaaactaaaaaagacaggcttgaaagaataaagcataaaaaaaggaacccctatgatcaccggagtgatgacgggggttctttttttatgcccgaatctcgcgcctttctatgatttctctgtcatgttttctcttttctttcatacaatctactaaatcaagtcaatagattagcgggaggaaagcggtatgagaaaacaatcgtacaaagaactgttttttcgccatgtaaaggatcatctgtcactttatatatttgtgttcgtcttgtttttgatgggggtcattttcggggcgatcatcgtcaacagcatgaccatcacgcagaaagaagatttgtattactatttaagcaagtttttcggacagctgtctgacggaaaacatgccggcgcttcagaaatgttttggcaggccgtctttcatgatgtaaaatatttggggctgatgtggattctcggtatttccgtgatcggtcttccggttattttcattatggtgttcttaaaaggaatcgtcgtcggcttcacggtcggttttttagtgaatcaaatggggatgaacgggtttttcctgtcatttatttcggttctgccgcaaaacatcgttctcattccagcatatcttatcatggggacatgctccatcgctttttcactgaaactgatccggcagctgtttgtcaaacgcagccttcatgacgcgccgatccaatggttcggacgctacgccttcgtactgattctcatcgttttcttctcggtcctcgcttcactgctcgaagcgtacatgtctccgctgtttatggaaaagctgtcatcacgcatattttagaattattatcacaaaataatacttttatttatcagtttataataattatagttggaactctgcgcgtattttgttataatgagtcatggaatgcggcgtaggagggaaagacatggaaaaccgtattgatcgaattaaaaagcagctgcactcgtcaagctacaagcttacgccacagcgggaagcaacggtaagagtgctgcttgaaaacgaagaagaccatttaagcgcagaagatgtatacctcctcgtaaaagagaaatctcctgaaattggtctcgctacagtataccgtacattagaattattaacagaattaaaagtcgttgataaaattaacttcggggacggcgtatcccgctacgaccttcgcaaagagggcgcggctcattttcatcaccatttggtgtgcatggagtgcggagccgtcgatgaaattgaagaagatctgcttgaagacgttgaagaagtgattgaacgtgattggaaatttaaaattaaagatcatagattgacttttcacggaatctgccaccgctgccgcggggatgaaacagagtaaaagcctatgaaccttttctgccaggaaagggttttttgctgtttttatgtataaaagcctttgaaattggcataaggtgtactaacagccgccaaagaaagggtcgatcgaaagatgggcagattcctgaaaacagccgcggatacgatcaaagtgtttattctgttcacaggttttaccgcgctgttctattatgctatgatatgggtgaattcagagtatgaaaactatcatcggtacgataaaccggaaggctccgccgtcaaagtggccaaaacggaacatgaggagaaagacggctggttcggccgattgatctttttttaccaaaacggggagtagatcaagagtgaaggatcaaattaaggatttcatccattatgtgagggttgaaagagggctgtccctaaatacgatgatgtcctatgagcgtgatctgaaaagttattctctcttcttaactgaaacccttcagatcacttcatggaatgatgtgacccgtcttcatattattcaatatttaaagcatataaaggactccgggaaatccggcaagacgtctgccaggcatttggcgtcgatccggtcttttcatcaatttctgttaagggaaaaagccgcggataaagatccttcggtacatattgaaacacaaaaaacagagcggacgcttccgaaagtattggcgcttcacgaagttgagcggttattggacacgcctaagcttgacagcccgttcggtctcagggataaagccatgcttgaactgctgtacgcaaccggcatccgggtcagcgagatgatcgagctgaaattatccgacgtccatttgacgatgggatttgtccgctgcttcggaaaagggcggaaagagcggattgtgccgattggtgaagccgcttcccatgcgatagaagcatacattgaaaaagccagagggaaattattaaagaaaaacgtaaccgaagcgctttttctgaatcatcacggcaggcagatcagccgtcagggattctggaaaaacctgaaaaaaatcgcccttgaagcggggattaaaaaagagctgacaccgcacacgctccggcactcttttgcaacgcacctgctcgaaaacggcgcggatctgcgcgccgtgcaggagatgctcggacatgccgatatttccacgacacaaatttatacgcatgtgacgaaaacaaggctgaaggacgtgtacaaacagtatcatccgcgagcttaggagccgctgccagaggggccgcggctttttttgccggattggcggaatacagagaaggttctaattatttgaatcggcattgtcaacaagaatgtaaacggtttatacttgagttgtctgacctctgtaagctacaatggacagatggaagaaaaggaggcttttatgatgtctgaatacaaatataaccgggtatttttaattgtaatggattctgtcggaatcggtgaagcgccggacgccgccgattttaatgatataggcgcaaatacgctcggacatatcgcagagcacatgaacggcttacatatgccccatatggcgcagctcggtctcggactgatcggagacattaagggcgtggaaaaaacggagcaccctcttgcgtactacggaaaaatgcaggaggcgtcaaacgggaaagatacgatgacggggcactgggagattatgggcctctacattgaaaaaccgtttaaagtgttcccggaaggattcccggatgaacttcttcaggaacttgagcggcgttcaggacggaaaatcatcggaaataagccggcttcaggcacggcgattctggacgagctcggaaaagaacatatggaaacgggtgcgctgatcgtttacacatcagcagattccgtgctgcagattgcggctcacgaagatgtcgttccgctggaagagctgtacagcatctgtgaaacggccagagaactgacgcttgatccgaagtacatggtcggccggattatcgcaagaccgttcgtcggagagccgggcagcttcaaacgcacgccgaaccgtcatgattatgcgctcaaaccgttcggccgcacggtaatgaacggaatgaaagacagcggattagacgtcatttccatcggcaaaatttctgatatttatgacggagaaggcattacatcttcccgccgcacggtatctaatatggatggcatggacaaagtgattgaaacgctcggtgaagagtttacgggcctgagctttgccaacctcgttgattttgacgcgctgtacggacaccgccgcgatccggaagggtacggaaaagcgcttgaggaattcgacgcgaggcttccggaagtgtttgaaaaaatgaaagaagacgatctgcttattatcactgcggatcacggcaatgatcctgtccatcacggcacggatcacacgcgggagtatgtgccgcttcttgtttacagcaaaaagcacaaacatacagaacagctgccgcttgcggatacatttgccgatatcggcgcaactattgccgataattttaaaacggaaaagccggaatacggaaaaagctttttatcaagattacagtagggggactttttttgaaacaaaagatcgaacgtgctgctgcatttattaaagaacacgtgaaagaaacaccaaagatcggtctgattttagggtcagggctcggcgtattggccgatgaaattgaaggagctgtcaagcttacatatgaaacgatccctgattttccggtctcaacggtagaaggccatgccggccagcttgtgatgggaacgcttgaaggcgtgcaggtcatcgcgatgcagggccgctttcattactatgaaggctactcaatggatcaggtcacatttccagtccgcgtgatgaaagcgctcggcgttgaatctctcgtcgtgacgaatgcagccggcggtatcaacactgaattccgcgccggcgatctgatgattattacagaccatatcaactttacaggcaccaacccgttaatcgggccgaacgaagctgaattcggagcgagattcccggacatgtcagaagcctatgacaaagagctgtcaagcttggctgaaaaaacggccgatgagctgggcattcctgttcaaaaaggtgtgtatacagctgttacggggccgtcttacgaaacacctgctgaggttcggtttttaagaacgatggggtctgacgctgtcggcatgtcgaccgtgccggaagtcatcgtcgccaaccacgcggggatacgcgtgctcggcatctcatgcatttccaacgcggcggcgggtattcttgaccagccgttatctcatgaagaagtaatggaaatgacggaaaaagtaaaaggcggctttttgaagcttgtcaaagccgtagtcgcacgatctcaaaaataagtcagcataagtcagctgtttcttcggaagcagctgtttttttgtgccctcaacacgaaacattttccagatgaggcgtataaaaccaccggatttggaaaaaataaaaaggattatgaaatggagggctttggagatgaaacgtcttatatccactttgttgattggcattttattaacggcatcagcaccgtccgcttttgcaaagccggacggaaaacatacatcggagctcgctcatgaagccaaaagcgccgtgctgattgaacgcgatacgggaagcattctttataacaagaacagccgggagcgtctggcgccggcaagcatgacaaaaatcatgaccatgcttttaatcatggaagcgcttgacaaagggaaaataaagatgagcgataaagtcaggacgagtgaacacgccgcgtccatgggcggatcacagattttccttgaacccggagaagaaatgacggtaaaagaaatgctcaaaggaattgcgatagcttccggaaatgacgcatctgtcgcaatggcggagtatatcgccggttcagaagaggatttcgtcagccggatgaacaaaaaagcaaaagaattgggattgaaagatacctccttcaaaaacccgacaggactgcctgaaaaagaccattacagctctgcttatgacatggcgaaaatggcgaaggaattattaaagtacgataaaatcactcaatttacgggaacgtatgaggattatttaagagaaaatacagacaaaaagttctggctcgtcaatacaaaccggctgatcaaattttacccgggtgtagacggcgtgaagacgggctttacaggcgaagcgaagtattgtttaaccgccaccgctaaaaaagggaatatgagggtcattgctgtcgttttcggagccagcaccccgaaagaaagaaacgcccaagtgaccaaaatgcttgattacgccttcagccagttcaaaacacacccgctgtacaaacggaatcaaatcgtcggaacggtaaaagtgaaaaaaggaaaacagaaactgatcaagctgaccacatctgagccgatttctcttctggccaaaaagggagagaacatggacaaagtaaaaaaagaagtgaaaatcaacggcaatgtaacggctccggttaaaaaaggagaggtgctcggcagcctcgttctgaaaaaagacggaaaggtgctcgttgaaagcccggtcacggcaaaagacgacatggaaaaagcgggttttctcacttttctgaagcggacgatgggagattggacaaaatttaaataatcatggcgaacgggcactagttttgtcatagtgaaggaattgctttcccgaaaatcgaaacactcattatccgatcatacaaggaggaatgagcatgagccttggaattgactttcatgtcaaagaatccgtgctttgtattcgattaacaggtgaactcgaccatcatacggcagaatcattaaaacaaaaggttactgaatcgctggaggctgacagcatccgtcacattgtgctgaaccttgaagatcttaccttcatggacagctccggcctcggcgtgattttagggcgttataaacaaattaaacagctcggcggagaaatggtcgtgtgcgcgatttcgccagcggtgagacgtctgtttgacatgtccggcctgtttaaaatcatcaggttcgaacaatcggaacaaaaagcgcttttaacgttgggggtggcttcatgaaaaacgagatgcatcttgaattttcagccctcagtcagaacgaatcgtttgcgcgcgtaacggttgcttcttttatcgcgcagcttgacccgacgatggatgagctgacggaaatcaagaccgtcgtatcagaagcggtaacaaacgcaatcatccacggctatgaagaaaactgcgacggaaaggtgtacatctccgttacgctggaggatcatgtcgtctatctgaccatacgtgatgaaggcctcgggatcacggatcttgaggaagcgcgccagccgctctttacgacaaaacccgagcttgagcgctccggaatgggctttaccattatggaaaactttatggatgatgtcacgattgattcctcgccggagatgggaacgacgatacgcttaacaaaacacctatcaaaaagcaaagcgctttgtaattaaggagatttgttatggatgtggaggttaagaaaaacagcaaaaacgcgcagctcaaggaccatgaagtcaaagaattaatcaaaaagagccaagagggcgaccagcaggcaagagacctcctcatagaaaaaaacatgcgtcttgtgtggtccgtcgttcaaaggtttttaaacagaggctatgagccggacgatctgtttcagatcggctgtatcggattattaaaatccgttgataaattcgatttgtcctatgatgtccgtttttcaacttatgccgtgccgatgattatcggagaaatccagcgcttcatccgtgatgacggaaccgtcaaagtatcaagatctttaaaagagctcggcaataaaatacgccgggcgaaagatgaactgtcaaaaacatacggaagagtgccgaccgtccaggaaatcgcggatcatttagaaattgatgcggaggatgtggtgcttgcgcaggaagcggtgcgggcgccttcatccattcatgagaccgtgtatgaaaatgacggagacccgatcaccctgcttgatcagatcgccgatcattcagaagagaagtggtttgacaaaatcgccctcaaggaagcgatcagtgatttggaagaacgggaaaaactcattgtctatctgagatattataaagatcagacacagtcggaagtagccgaacggctcgggatttcccaagtccaggtatcgaggctggagaaaaaaatattaaagcagattaaagtgcagatggatcatacggaaagctgaccttttacgggccggctttttttatttgtgcatcggtggtaatttatggtcttttgcggctgatgaatgagaacaaaagtgaaccacatactacatatataaccacccgaaagatggtgatgcaagatggaaagacgaatatttctcagacttcgccaccgcgtgaaggctcataccggagatatcatcacagtcggcgacgccgcgcagattgcgggacagcaaaagctgaaaaaaaaactgtcggcactgccgctgtataaggtcacgaaaaaagacaaaaatatcgtcgtgctggacatcataaaagtgctgaaaaccattcataccgcttttcccgcgcttgatgtacaggccgtcggcggcgctgaaacgatagtggaaatccattaccagaaaaagcagctgtcagccgttttattcgtcggtgtctggctcctgctttttatcggttcatgtcttgccattatgaattttcatgaagatgtcagtatgagagaagttcatatcgccttatatgaaatcataacgggcgaacggaatgaatacccgtatctgcttcagattccatacagcatcggcctcggtctcggtatgatcgtcttttttaatcacatcttcaaaaaacgcctgaatgaagagccaagcccgctggaagtcgagatgtttaattatcagcttgatctcgatcattatgtcgcaatgcacgaaaatgaagagacgatgaaagatctgcatgatcgttagcattcttttcgttgtatttgtcgggcttggcggagggctgaccgtgggcgcgggctttgtggcttttttaaccgttatgggaatcgtcccccgccttatgcagctgacaaaaacaatgcgctttgtacaggcctacgaaggagcagttatttcaggagctgtgttcggcggctgggaaaccttaaatatgaatcatttttttttatctgaatggctggccgttccggtcgggcttttggccggcatgtttatcggcatgctggccgccgcgcttacagaagtgctgaatgtgcttcccattcttgccaaacggatcggcttcggcagcaaaatcattatattgctgatggccattgtgttcggcaaaatagccggctctttatttcattggctgtattttatccatcattcataaggaggaaccgacgtgacaaacttaaaagaaaattacaaaacaaaagtgaaagactatcagccgaaaccgccatatgtttggaattgcgtcaaagcctttctgatcggcggtttgatctgtctgatcggacaggctcttcaagacttttacatccacttttttaattttaatgaaaaaacagcgggcaacccgacggccgccactcttattttaatttccgcccttttgaccggattcggcatttatgacagactcgggcagtttgccggagcgggttcagccgtgccggtgacgggttttgcaaacagtatgacaagcgcggctctggaacacagaagtgaaggactcgtgctcggagtagcgacaaacatgtttaaattggcgggaaacgtcattgtattcggcgtcgtggcagcctatatcgtaggcctgatacggtttgcttgtgaaaaactgttttcgtaggaggagaaaaaatgaaattaaccggaaagcaaacctgggtgtttgaaaacccgttatttgtaaatgcggcggggacggcagccggaccgaaagaaaaagacggcccgctcggttcgctgtttgataagacatacgatgaaatgcattgcaatcagaaaaactgggaaatggcggaacgtcagttaatggaagatgccatcaactcagctttgcaaaaacagaatttgaaaaagagcgatattgatttgttactcgcgggggatcttttaaatcaaaatgtgaccgccaactacgtcgccagacatctgaaaattccgttcctctgtctgttcggcgcctgttcgacatcaatggaaacgattgccgtcgcatccgcgctcattgacggcggttttgcgaaccgggcgatcgcagccacgagcagccataacgcgacggcagaacggcaattccgcaatccgacggagtatggcgggcaaaaaccggataccgccacttcaacggtcacggggggcggggcggtcatcatcagccaaaacccttctgatatcaagattacaagcgcaacagtgggaaaagtaagcgacctcgggattacggacccgttcgatatgggatccgccatggcgcccgctgccgccgacacaatcaaacagcacctgcaggacttaaaccgcacggcggatgattatgatctgattttaacgggagacctttcaggcgtcggctcgccgatcgtgaaagatttgctcaaagaagaaggctatcccgccggaacgaaacacgatgactgcggtcttctcatctatacgccggaccagcaggtgtttgcgggcggaagcggctgcgcctgctccgcgcttgttacgtacacacatatttttaatcaattaaaatcaggggctctgaacagggtgctcgttgtcgcgacaggagcgcttttaagtccgacaatgatccagcagaaagaaaccattccgaccatcgcgcacggtgtggtatttgagcgggcgggaggtgcatcataaatggaatatctgttggcttttgtttgcgggggaatcatatgcattatcggtcagctgctgcttgacatttttaaactgacacccgcccatgtgatgacaacttttgtcgtcatcggcgccttgttggatgggttcggaatatatgacaaatttatcgaatttgcaggtgcgggcgcgacggttcccattgtcagcttcggtcacagcttattgcacggcgccatgcatcaagctcacgagcatggatttatcgggatcgccatggggatttttgaacttacttccgccggtatatcttcagcgattttattcgcatttcttgtagccattatttttaaaccgaaaggataatgcctgatgacgaaacggaaggtcattcttgtgacagacgggacgtatacgccgccaaaacaattgaatatgccgcggaaaaagcaggcgggcggtgtatttcccaatcaaagggcaatccgtcaaccagaagcggccccgaacttgttcagctgattaaagccgcgccgaatgacccggtgtttgtcatgtttgacgattcaggcctgcaaggggaagggccgggcgaaacggcgctgaaatatgtcgcctcacatcaggacattgaagtgctggggtgattgcggtcgcttctaagacccatcaggctgaatggacgaaagtcgatgtctccattgaccgtgatggagaagtgacggagtatggcgtcgataaaaccggaatgagagaaatggacgagcacagaatgaacggagatacggtgtattgtctggataaattggacgttcctctcattgtgggcatcggcgacataggaaagatggggagaaaagatgacatatccaaaggctcgccgattacgatgaaggcggtcgaattcattttagaaaggagcgaaagtcatgccggaaaaaccggaaaacatgatcaaggtataccgggatcctagaaaaaatgaacaattttttaaagaccgcgtcggtatgggaacgagctatgatgtcggcgtccgcaaagttcgagtattagaccgggaagtccagatttactttgtcaacggattaaccgatactttgtttatcattcatttaatggaacagctcgtcgacgtcaataattatgatgagaatgcggatgaagcgattgacgttgttgaaaacaggcttgtcaatcagcaggtccaaaaagtcaaaacgctcgacgaagcaacagatcaagtgctttccggacttgtggccgttatcgttgaagacgcgggcttcgcctttatcgttgacgtcagaagttaccccggacgcacaccggaagaaccggatacggaaaaggtcgtccgcggggcaagagacggttttatcgaaaatatcgtcattaatacagcattgatcagaagacgaatcagagacgaaaggctccgcgtcaaaattacgaaagtcggcgagcgctctaagaccgatcttgccattgtgtatatagaagacatcgcggacccggaccttgtcagcatcgtcgaaaacgaagtgaatgcgattgacattgacggattgacgatgtctgataaaacagtggaagaattcatcgtcaaacagggctacaacccgtttccgatggtcagatacacggagcggccggatgtggccgccaatcacattttggaagggcacgtcatcatcgtcgttgatacgtcaccgagcgtgatcataacgccgacaacgatttttcaccatgttcagcatgcggaagaatacaggcaggcgccttcagtgggaacatttttaagatggatcaggttcttcggtattatcgcttcaacggttctgcttccgatctggtttctctttgttctcgaaccgtctcttctgcctgaaagattggattttatcggtttaaataaaaatacgcacatcccgatcattctgcaaatctttttagccgatttggggattgagtttctcaggatggccgcgatccatacgccgaccgctttatccaccgccatgggtctgattgcggcggtgctgatcggtcaaatcgccatagcggtggggctgttttcagcagaagtgattctgtatgtatcgatcgccgccatcggatcatttaccacgccgagttatgagctcagcctcgccaataaaatgatacgcctcatcttaatggtgctcgtggccattttccaagtgaaaggctttgtgataggctttacattgctgctgatcataatggcgaatatccgttcgtttcatacgccgtatttatggccgtttttaccgtttaacggcaaggcgctgtggcaggtgctcgtccggacgacagtgccgggagcgaaagtcagaccgagcattgttcacccgaaagaccgtcaaagacagccaagcggttcataatcgcattgaaaccgacagaagattatgatattgtatgtcttaacttatacgggacttgtataaggacagctcaaaagaagctgtccttttcacccataggcggatcagaaagagggaatgagcattgttcttacatggcacaagcagacaaaacaaactaggtcatttggaaatcggaggtgtggacgcgctgtatttagcggagcattacggcacgcctctttatgtttacgatgtggctttaatacgtgagcgcgctaaaagctttaaacaggcattcattgacgcggatttaaaggcgcaggtcgcgtacgcgagcaaggcgttttcttccgttgcgatgatacagctcgctgagcaggaggggctctcattggacgttgtatccggcggagagctgtttacggcggttgcggctggttttccggctgacaggattcattttcacggcaacaacaaaagcaaagaagagttgaaaatggcgctcgatcatcaaatcggctgcatcgtcgttgataatttttatgaaatatccttactcgcggaactgtgccgcaaatcagggcgcacaatggatgtgcttctccggatcactccggggtagaggcccatacgcatgattatattacaacggggcaggaagattccaaattcggttttgatctgcataacgggcaaatagaaaaggcgattgaacaagtattgcagtcagaccatatccgccttctcggcgttcactgccacatcggatcgcaaatttttgatacggcgggctttgtgctggccgcagaaaaaatctttgcaaaactgaatgaatggagagaatcattcggctttgtctctgaagtgctgaatttagggggcggcttcggcatccgctacacggaagaggatgaaccccttcatcccgccgtttatgtggaaaaaattatcgaagcggtaaaagaaaacgcagcgctgcacgcttttgacattccggagatctggattgaaccgggacgctcgctcgtcggagatgccggaacgacgctttataccatcggttcgcaaaaagaagtgcccggcacccgtaaatatgcagcggttgacgggggcatgagcgataatatccgtcctgcgctttatcaggcgaaatatgaagccgtatcggcaaacagaatcggagaacaccacgacaaaacggtatccatcgcgggtaagtgctgtgaaagcggggatatgctcatttgggatatagaccttccggaagtgaaagaaggcgatcttctcgccgttttctgcacgggagcgtacggatacagcatggctaacaactacaaccgtattccgcgtcccgccgtcgtttttgtggaagacggcgaagcgcatcttgtcattagaagagaaacttatgaagacattgtaaaactggatctgccgtttaagactggggtcaaacaataaataaaaaagagaccggaacaatggcgtccggtctctttttgcgttcagctgtcagaacttgatccgctgtctcctgtaaatacagacacgatcgcattccaaatcgaagcgaagaaatcaataactttttgaacaaagcttttgccttcatcggattgaatgaacttcgtgattttgtcttttgccttatcgagctggctgccgacttggccccaatcaatctttgcatttttcattttattaaacaatgaaacgagctggtctttttgagcgtcagtcagtgtaatgttaaggtttgaagccgcatcatcgacctttttctcgattccttcttttgtatcgggcacaccgtttttcgcgaaatcatctttaatgtttgcgataagcgcggaggcgtttttatccccgattttatccccgagatttgaagtggtgacaagctcttggttggcgacctgttttacatcttctgaaatcgctttgtctgatgagacttcatatgccttgatgattcccgttaatgctgcggtgcctgatacctcaaacggcgccgtcacgtatactttcgcatctttcactcctgctgtcatcagggcgtttaagtacatttcatccgtaatggaatcgatattatgggtcttaacgtcaagcccggaccctttctttgccaccgtaatggatgacgaagagatggctcttgtgccgatttgggcattcgatatatattttcccagatattcatgttcttctttatttgtgaccgtcacttttgtcgcgttatcagggacatttaattcgtcaagcactttctgacggttttcgtttgacagatccgcccccagtgtgacgatgacatctccgactgcggcatcggccaggctgattttcggtattgtgcacaatacaacggccgccgccagcaatccaatccacatttttttcaaagcggttaacctccttcttttcacaaatgccgttttgaagcggtttgtgaggacctgcgagaagcagttccgatacatagacggctgtgaagctgttctggtttcattttctttctgcggaagcggggagattcgttttccggctgaaggtgtggtataatagccgcgaaaagaagagcagaggcctcttccttcaaaagaatatcaaaaagaaagccggcttacaattgaaattcatattaaagaaggctttgacaaaaaacaatacggaagtaggaatgagaatgaaaactggttacatcgaaatggaaaacggcagcagaatcgaatttgaactttatccgaatgaagcgcctaatacagtcgctaactttgaaaatctggcgaatacgggcttttatgacggcgttattttccaccgcgtgattccgggctttgtcagccaaggcggagatccgactgggacaggcatgggcggaagcggaaaaacgatcaaatgtgaaacagaaggcaatccgcataaacacgaagccggttctttatcaatggcgcatgccggtaaagacacgggttcaagccaattcttcatcgtacatgagccgcagccgcatttaaacggcgttcatactgtattcggaaaagtgacaagcggtttagagcatgcgaaaaacatgtctaacggagacaaaatgaaagaaatccgtgtagaaggataatgacggaaaacccgcctttttcaggcgggttttttttatgtatatgaaaattctcatgtgtaaatcatgaaaaaatacatatatgaacatcggtgatcattctggtatagtgaaaaagaccgattacaacaatgaaaagaggtagaaacgttggttcaattggcaaccgttttatttgtcattatcattctcgcacttatgatttggttcagggtaaaaaagggaaacaggccgattaaaggcggcggcttaggcatcattctcccgcttttgattatcgccgtcatttttacattcagtatcagccagctcatgaatatcccgggaaagccgtttcattttcccgctctttgggagctcgccatcgccggactgttaggcgcggtattcggtatcatcatgctgtcgcaaaccgcctatgaaatccgggaagacggctttgtctactccaagcggaataaaaactttaaatatgtcattatcgcgattattgcgatccgtatcgcactcagccaatatttcaaaagcattgacgcggctgaattcgccgttttaacgatggagcttgcttttgtgtatttgtgcatttggcggatcggaagcttcgtgaaataccgtaaaatcagcagatccggcttataaaatgaaaaaaagggatggggtgcggggcttatttgccctctgtgcagggattcatggtaaaataaaaatgaccatggctaatgggaggaaatcacttgaaatcagaaaaagaaaaaacttctaaaaaaagcgccgtacttgattgggcgaaagccattatcatcgctgtcgttctggcactgctcatccgaaactttttatttgccccttatctcgttgatggtagatcaatggatccgacgctgcatgaccgcgagagaatctttgtcaatatgacggtcaaatacataagcgacttcaaacgcgaccagatcgtcgtgctgaacggagaaaatgagcactatgtcaaacggattatcggacttcccggcgacacggtgcaaatgaaaaacgatcagctgtatatcaacggcaaaaaagtgtccgaaccgtatttagcggcaaataagcacaaggcgaagcaagacggctatgaccggctgacagaagacttcggcccggtgaaagtgccggacgacaaatatttcgtcatgggtgataaccgcagagaatctatggacagccgcaacggcctcggtctttttacaaaaaaacaaatagcgggcacatcaaaattcgtcttcttcccgtttaacgaaattcgcaagacgaaataaaccgtacaggcagttttcttcatgagaaaactgctttttttatataaatttatctctccaccctcaaaaacagaacataaattcgtatatctatttaatagatagaaagttttacagatacatgaaacatcttccctttatgaaacgttatatgaataactcacgcagggaagaacggttttctattcatgaaaaaaaggaatatgacatagtaatgaatagattgatacgggctggaggtagaaaaatgggaagaattaaaacaaaagcagccattttacttgtactgctgctgttattagcgggcggttatatggtcataaacgatattgaactgaaagacgtgccgactgcaatcggacaaaccctgtcccaggaaaaagaagaatatacagtcaaaacatataaaattacgaaaatcgaaggaactgagtaccacggtacggcagcgaacggcacaaaaattatttttaacggcgacaagctgaagcaggatctctccgatgtgcaaaaaggtgataagattaaagcgtatttcagcaaatcaaaccggattgacggcttattgaaggtcgtcaaagtgaacgaataaataaagacgccttttatgggaaaagggcgctttttatttttctgaataatgaggtgcaaattcattgcgcctgccgcaaaggatgttataatagcggataaggacaaaaaaatattgattgtatccttcggggctgggtgaaaatcccgaccggcggtaataaggcgctttgcgctttacagcccgtgacccgtatgcatctgtatacggtggattcagtgaaaagctgaagccgacagtgaaagtctggatgggagaaggatgagagaagctatgcaaaaaataaacttactgtatagtcttatttcctatggattaaaactggcaaagccccgaactgtgtaaacattcggggcttttttgacgccaaattgcgtggaagaagggagggataacaatggatgaatattatatgaatacggcaatagaacttgccagacgcggtgaaggacagacacagtccaatcctcttgtcggcgctgtcgtcgtcaaaaacggacagatcgtcggaatgggcgcccatttgcaatacggagaagcgcatgccgaggttcacgcgattaatatggccggcagacacgcaaaaggcgccgatttgtatgtgacgctggagccttgcagccattacggaaaaacaccgccatgcgccgaactgataataaagtcggggataaaaagggtgttcattgctgtgaaagatccgaatccgcttgtagccggaaaaggcatcggaatgctggaagcagcgggcatcgaagtgaaaaccggccttctcaggcagcaggcagaagagctgaataaaatgtttcttcacttcatgcggaccggacttccgtatgtcaccttgaaagcggccgcgagccttgacgggaaaacagcgaccgaaaccggtgacagcaaatggattacatcagaggcggcaaggcttgatgcccagcaatacaggaaatcgcatcaaagcattcttgtcggagcaggcacagtcaaagccgataatccgagcctgacctgcaggcttcctgatgcggtgaagcagccggtcagagtgattctcgatacaaagctgaccattcctgaaacggcaaatgtgctcactgacggcgctgcgccgacatggatatttacggccaaaggtgcagacgtgcaaaagaaagaccggctgaccgcactcggaataaaagtttttccgctggaaacagaccgcattcacatccctgaggtgctcagtgttctcgctgaaaacggaataatgtccgtttatgtggaaggcggagcatccgtacacggaagttttgtgaaggaaggctgtttccaagagcttcatttctatttcgcccctaaattaatcggaggaacgcttgctcccagcttgatctccggtgaaggttttcaatcaatgaaagatgtcccccatttgcaattcacacaaatcacccaaatcgggccggatataaaactgacggccatacctaaagatggaaaggatggtgacgatgtttacaggaatcgttgaagaaacaggcacgatccaagcaatcgaaaagacaggcctttccatggcattaaccatcgccgcttcaaaagtgacaagtgatgtgaaacttggcgacagcattgcggtaaacggcatctgcctgaccgtaaccggattttctgacaatcaatttacggttgatgtcatgccggaaacagtgaaatccacttcgctgaacggcttgtcaaaaggcagtaaagtaaacctggaaagagcgatgtccgccaacggacggttcggcggccactttgtatcagggcatgtggacggaacggcggaaattacgcggatcgagaaaaaaagcaacgcggtctattacgatttaaaactttcgccggaattgacaaaaacgctcgtattgaaaggttcaattacggtagacggcgtgagcctgacgattttcggtctatcagatgaaagcgtgacggtatccatcattccgcataccatctcagaaacgatttttcagacgaaaacagtcggatcgaccgtaaatattgagtgtgacatgatcggcaaatacttataccgctttttgcacaaaacagaacaaacgaaaagcaatcaaactatcacggaagcctttttaagcgagaacggcttttagaaaggaagatcgatatgtttcatccgatagaagaggcgttagaggcgctgaaaaaaggtgaagtcatcattgttgtcgatgatgaagacagagaaaacgaaggagatttcgtagcgctggctgagcatgccacgcctgaagtggtgaattttatggcgacccatgggagaggtctgatctgcacgccgctgtctgaagacatcgccggccggctggatcttcacccgatggtcgatcataatacggactcacatgagaccgcctttacggtcagtattgaccacaggctgacaaaaacgggcatcagcgctcaagaacgttcttttaccattcaggcgctgttgaacgaggaatctgtgtctgacgattttcagcgtccgggccacattttccccttaatcgcaaaaaaaggaggcgtcctgaagcgggcgggccatacggaagcagccgttgaccttgcaaaagcctgcggatctcagggagcgggcgtcatttgtgaaattatgaatgaagacggcacaatggccagagtgccggagttagccgaaatcgccgaacgtcaccagctgaaaatgattacgataaaagacttaatagagtaccgttacaacattacgacacttgtgaacagagaagttgatattacgctgccgactgacttcggcacgtttagagtttacggatatacaaacgaggttgacggaaaagaacatctcgcctttgtcatgggggatgtcccgtttaacagcgaacccgttcttgtcagagtgcactcagaatgcctgacgggcgatgtgtttgcatcccatcgctgtgattgcggacctcagcttcatgccgcgcttgcgcaaattgctgaagaaggccgcggcgttctattgtatttgcgccaggaaggcagaggaatcggtttaatcaataagctgaaggcgtaccgattgcaggaacaagggtacgacacggttgaagcgaacgaagcgctcggctttctgcctgatctgcgcaactacggcatcggcgcccagattctccgcgacttaggggttcagcatatgaaacttttaaccaataacccccggaaaatcgccggcctcgaaggatacggtctcagcatttcggaacgggtgccgcttcaaatggaagcgagtgagcataacaagcagtatttacagaccaaaatgaaaaaacttggacatctgcttcatttctaaaaacaaatctcacaaaaaaggatggataacatatgaatatcatacaaggaaacctagtaggaacaggacttaaaatcggaatcgtcgtcggcagatttaatgaatttataacgagcaagctgttaagcggagcggaagacacgctgcttcgccacggtgtagaatcaaacgacattgacgtcgcttgggtgccgggagcgtttgaaatcccgtttgcggcaaagaaaatggcggaaacgaaaaaatacgatgccgtcattacgctcggcacggttatcagaggagcgacaacgcattatgactatgtctgcaatgaagcggcaaaaggcatcgcccaggcgggaacggcgacgggcgtcccggttatcttcggcatcgtgacgactgaaaccattgagcaggccatcgaacgagccggaacaaaagccggaaataagggagcggattgcgcagtatctgccattgaaatggcaaatttaaaccgttcatttgaataatttgttgaaaagcgtttaaaaccgcggcgaaaatgatataatgtgagaaaacggatcgcctttatgtatccgtttgataggacatgaatggacattttggatatagaggggtttttatgttaattcgttataaaaaatcgtttgaaaagattgcgatgggtcttctgtcatttatgccgaatgaaaaagatctcaagcagcttcagcagacaataaaggactatgaaacggatactggccgccagctctttctttggaaagaggatgaagatatcgtcggagcgatcggagtcgaaaaaaaggactcagaggttgaaatccggcatatcagcgtgaatccttctcaccgccatcaaggaatcggaaagcaaatgatggacgccttaaaacgtctgttcaaaacggaggcactcgttccgaatgaattaacgcaaagcttttttgaacgctgtcaacatcaaaaagatcaggatatctcatataataactgacaaatgctcccggaatcttcacggtttcgggagctgttttgatatagaaaaagcagggctgaccgtcagcctctgcttttttttcttctctcaatttcccgttcgcgttccttaatgacatccgtcctgtcccgcaggcggtgtttatgaataagaaaggtatctgatacgccgtcttgcccccatgtatagccctttcggcggcattcggcaagacatgcttctttcagggcttcatctgtaatcggaagcataacacttctgtaaggcaggcccgcttctatatcgtctgacagcgtttctatcagctcaatcagcttcggatggctgagaccgagagaacagaccgcctgcttttcagaccggagaatacgtaagctgttggcaatcagccgtttcgccccggcttcatttcccctgcgctggtgatacagagcgacggcaagctgaatcaggccgacccaatgaatgctccgcttttcagccgggctttctttccaatattcctctaacagttcatgacattcaaaataatctcttgatgcgtgaaattcggccaaaaagccgatataagctttaggatacaagccgcttcctccttttatgctaaaaccagtgtaccacagcgctttgaaaaggaaaaaagagcggcttggtgtctgaagcctgaggaactagcagatgtaagatgctcctacgacaacgagcaaaataaacagaacgacaattaatgcaaaacctccgccgaaacaagctccgctcatgtgaaatcagcctccctttgtttcaagtttacacggctatcctatgtgcatccgcctttaaaggtataggcgtatatcttctttttcagtattttctaaataacggaggacgtgtataaaagtattggacgagagcatttcggtggattatactaaagggtagccagtttttccggcaatgagagtgatactgaaaatggtgagataatggtagaatatcaagtgaaaattgatacgtttgaaggcccattggacctgctgcttcatctgattaaccgtcttgaaatcgacatatatgacatacccgtggcaaccattactgaacaatatttattatatgtacatacaatgcaagagcttgaacttgatgtcgccagtgaatatctggtcatggcggcgacgcttctcagcattaaaagcagaatgctgcttccgaaacaagaagaagagctgtttgaagacgaaatgcttgaagaagaagaccctcgggacgagctgattgaaaagctgattgagtatagaaagtataaaaccgctgcgaaggatttaaaagagcgggaagaagaaagacaaaagtcatttacaaagccgccgagtgatttaagtgagtatgcaaaagaaatcaaacagaccgagcagaaactgtcggtgaccgtttatgacatgatcggcgcgtttcaaaaggtgcttcagcgtaaaaaaatcacgcggccgaaagaaacgaccattacaagacaggaaataccgattgaagacagaatgaaagaaatcgtaaaaagcttaaaaacggcggggagaagaataaacttcacggagctttttccttctcggcaaagggaccatctcgtcgtgacgtttttagcagtcctggaactgatgaaaaatcagcagattatcattgaacaggaagaaaacttttcagatatatacattacggggagtgaatccattcatggcgtttgatatcgtgaattggaaagcgattgtggaagccctgctgtatgcggcgggtgatgaaggactgaccaaaaagcaattggtgacggtgcttgaaatagaagaagcggaactggccggaatcatggaagaagtggccgctcagtacaaggaagacgacagaggcatcgagcttaccgaatatgcggatacgtatatgcttggaacgaaaaaagaattcgtgccttatttgaaaaaactaatcgaagtgccgtcaaaagggctgtcgcaggcttctttggaagtgctggcgatcgtttcgtacaagcagccgatcacacgggcggaaattgaagatatccggggcgtgaagtctgagcggattctgcacagcctcgtgtcaaaagcgctgctgtgtgaggtgggccgcgccgacggtcccggccgggcgattttatacggcacgacaccggtatttcttgaacaattcggcttaaaaacattggaggagctcccgccgcttcctgaaaatgcggaggaagacgttctccaggaggaagccgatttattctttgaaaacttcaaccaaacttttgaggatattaaataataatcgtttttcatcatacgatagtagggaaaggccattgatgaatgacgcaaatgacgacgtacaagagaggaaggaaacggacggaaatgggaaattcgattgtgagggcccatactgaagaaactggtgaatttttagccgaggttgtcacgatggtcagcagctatttaaatcatacaacattgccggagatgcgggctcaaggagaggcggatgaggcatactgccgcgacgtgctcagtgtgctgaggaggatgaccgtcttttgcgaaggcgcccaggaagcctgccggcggctcttaatgcaggagccgtttcatgaggtgagagcggaaaaaacgctgtataaagtgtatcatcagtgcgtggaagaatttttcatgccaaaaaaggatacatggtacgaaaacagccgcgccgcttatacaggccaaagcgcgattgagttctaccagcaagtgccggactcgctgcggagccttctgctttcgctcagcagtgaatttctgcggatgcgggaagaattggcgcaatatgaagcatcaggctcaaatatggcatcagtcagataaaaactcttccttttgggagagtttttttatgtgaaagtgatgcaattggtattcataagtcatggacaggcgcataaacttgtacaaacccacaacaaggacgtgagcattcatgcgctttctcaaaaaagctgccgtatttcttttgacttttgttattcttttttccattacagacggcaatacggcacatgcccaaatacatgtcagcgcaaaaagcgcgattattatcgacggagcatctggcagggtgttattcgccaaggatgaacatcataagcggcggattgcaagcattacgaaaatcatgacggcggtgctggcgattgaatcaggaaagatggaagagaccgtgacggtttccccgaatgctgtaaaaacggaaggctcagccatttatcttcagccgggacaaaaagtaaagctgaaagatcttgtatacgggcttatgctgagatcaggaaatgacgccgctgcggcaatagctgaatatgtcggcggaagccttgacggttttgtatttatgatgaacaaaaaagccgagcaaatcgggatggaaaatacaaaatttcaaaatccgcacggactggacgaccatgaaaatttatattcaacggcgtatgacatggcgcttttgactaaatacgcaatgaaaatcaaggaataccggaccgtttcaggcacaaaagtgtataaggcggaaacgatggaccgggtatggaaaaataaaaacaagcttctgactgggctctaccgttacagcacaggcggaaaaacgggttacacaaaaatcgcgaaacggacgctcgtttcgacggcttcaaaagacggaacggatctcatcgcggtcaccataaatgatccggatgactgggatgaccatatgaatatgtttaattatgtctttgaacactataaaacctatgtcgtcgctaaaaaaggcggcattccgaagctgaaaaagacgttttacggaaaacacgcttttattgcccgggatgtcaaatatttattaaaagaggatgaaatcgacgatgtaaaaatccgcacaaccttaataaaaccgaaaaaagcctggaaaaaggacgcctctctcattcctgatgtcgtcggccggatgactgttatgcatgatgggaaagtgatcgccaagattcccgtctattatgaaaacgagcgccataaaaaaccgaaaaagcatttcattgagacgtttacgagcctgtttatgagcgcggcgggcggttcgtcatggtcaatttaatctgggtatgtctgacggtaatcggacttgtctttgcgatgtttaacggtaccttgcaggatgtgaatgaagctgtttttaaaggagcaaaagaagcggttacgatctcgttcggattaatgagcgtgctcgtcttctggctcggcctgatgaaaatagccgagcagtccggccttttggatatattcagcagaatgtgccgcccgtttatctctaagctgtttcccgatattccccctgatcatccggccatggggtacatcttatcaaatctcatggcaaactttttcggactgggaaatgcggcgacaccgctcggcattaaagccatggagcagatgaaaaagctgaatggaggtaagtctgaggccagccgttccatgattacctttttggcggtaaatacttcgagtattacattgataccgacaaccgtcattgccgtgcgcatggcttattcggcgaaatcaccgaccgatatcgtcgggccgaccatcttagcgactttaatttcgggaatcggcgcgattttcattgaccgctacttctggtaccgccgcaaaagaaaagggaggtaagcgaatggaaatggtgaattggctgtctttagccatgattccgattattatcgccggtatattgatatacggcacgatcaaaaaagtgccgacgtatgaatcattcgttgaaggcggaaaagaaggaattgagattgcgttttccatcattccgtatttggtcgggatgctggtggcgattaccgtattccgggcctcaggcgcgctggattttgtcatggggctgtgcaagcctttctttacagcgctcggcattcccgcagaagtcgtgccgcttgctctgatccgcccgatttcggggacggcggcgctcggcatgacgacagatctgatcgccgtgtacgggcctgattcatttatcggcagactggcctcggtcatgcagggatcgactgatacgacgctgtatgtcctgacggtgtatttcggggcggtcggcatcaaaaaaatgggggatgctttaaaggtcggtcttcttgctgatctgatcggggtggttgcatcaatcatcatagttgcgttattatttggaagcgcctgaaatcaggcgctttttatatatcagaataactctccttgaaaaagcttgtttgttcaaggggaaaaaagtaagattatacttgaggtgaacgacatggaaagactgcaaaaagttattgctcatgccggcgtggcatcacgcagaaaggcggaagagctgataaaagaaggaaaagtaaaggtgaatggaaaagtaataacagagctcggcgtaaaagtgaccggttctgatcagattgaagtaaacggattaaaggtggagcgggaagaacccgtgtactttctgctttataaaccgagaggagtgatctcagcagctgatgacgacaaagggcggaaagtggtgaccgactttttcaaagaagtgccgcagcgcatttatccgatcggcaggcttgattatgatacgagcggacttttattgctgacaaatgacggcgagtttgccaacaaactcatgcatccgaaatacgaaattgataagacgtacgtcgccaaagtgaaggggattccttccaaggaacttctgagaaagcttgagcgcggcattcagcttgaagaaggcaagacggcgccggccagagcgaaaatgctttccctggacaaaagaaagcagacgagcattattcagctgacgattcatgaaggccgaaacagacaggtccgccgcatgtttgaggcgatcggtcatgacgtgctgaaactcaaacgtgaagaatacgcatttttagatttaagaggcctgcgcacaggagacgcaagagaattgacgccgcatgaggtgaaaaggctgcgggctttagctgaacacggtaaaaacgctttctaattttcacataaccttcaaaaattacaaaacgtgtagatgatataattgaatggatttgcagacaggggaggggagcagtgtacaatgaacaaaaaacggcggcgtttattcattcggaccggcatccttctcatcttactctgcgcgctcggatataccatctataatgccgtttacacaaacggagagcgtatatctgaggggtccaaagccccgaatttcgcgctgaaagatacagagggcagactcatagaactgagtcagttaaaagggaaaggtgtttttctgaatttctggggaacgtggtgtgagccgtgcaagcaggaatttccctacatggagaatcaatacaagcattttaaagacctcggtgtcgaggtggttgcggtaaatgtcggcgaatcaaaaattgcagtacataattttatgaaaacatacggcgtcaatttcccggttgcgctcgatactgaccggcaagtgctggacgcgtacggcgtatcacctattccgacgacatttttgatcaatcccgacggaaaggtcgtgaaagtggtgaccggcacgatgacagaacgcatggttcatgactatatgaatttaattaagccggaggcgtcttcatgaaaaaggtcaaatgtgagtgcgggcacgtgaatccagccgggacggttttgtgcgagtcgtgcgggaagccgcttgatgatcaaaaatcgccgcttgccgatatgcggtacgacggcagcgcaaggcgttcgcaaacatataacaaaacaatcgtagataaggtatggaacttcttttcttccgtaaaagtcggaatatggctgatcgtcattactctggcggcgtctgctttcggcacggtttttccgcaggaagcttatctgcctccgggcgcccagccggatacatattatgaacagcagtacggcataatcggccaactgtattatttgctggggtttcatcacctgtacggctcatggtggtatatgctcctgatcgcatccattggcatatcactggtcatctgcagcctggatcgggtgattcctttgtacagggcgcttaaaaatcaaggagttcggcggaatccggtctttttgaagaggcagcgtctatacagccggacagaaaccgagctgagcggggatgcggctgatagcctcagaacacgattgaaaaaaaagcattatagagtgcgagaacaagagggaagcatcctggcggaaaaaggccgtttttcaaggtggggaccctatgtcaatcatatcggcctgatcatttttctgatcggagccatgctgagatttgtacccggtatgtatgtcgatgaaacgctctgggtccgtgaaggcgaaaccgcccagatccccggtacagacggcaaatattacttaaaaaacaaccggttcacgatgcagacatataacaaagacactgagaaaaaagtattcgccgacgccattgacagagccggaaacggcaaagtcgccaaatccttcacaacggacgcggttctgtacaagagggaaggcgacattgtattcggtgaaaagccgaagcttaaaagagtcaaagaaaacaatatccgcgtcaatgaaccgctgcgctttgactcctattctgtgtatcaggtggactataaagaaaaccagctcgatcagatggtatttcagctgatcgaccaaaaaacaaaacagtcattcggcaaactgaagatcaatcttcttgatcccgacacggactacgatcttggtaacggttacaaagtgcagattgccagttatcttcctgatttttattttaacaaagacggagaaccgagcacgaagacgaaggttcctaacaatccggcttttgtctttaaaatcacggctcccgacaagccgaaaggggagaaaagttttgttgcgattcagcagactgttgaaggttccgaaagtaacaagtacaaattaaaattcgaccatgtggaaacgaaaaacattacaggactcaccgtcagaaaagacttaaccttatgggtgcttgccgtcggcggcgcgatctttatgatcggcgtcattcaagggatgtactggcagcacagaaggatctggatcaaaacaggtgatcatgaagtgcttgtggcgggacatacgaacaaaaactggttcggtctgaaaaaggatatcgaatttgttcttagcgggaccgggattcaagagccggccgatcaaaaagaattggccaaaaatcaggcctagtgaaaaaggagtggtgtcatggcggagctgagcgcaaattttctttatgctgcctttttgatttatttaattgccgtcccggttttcggcggcgccatccggggaacaaaaggtgcgaaggacggtaagggccgctggtcggctatcggaatcacgttaaccattttcggatttctttgtcacctcggctactttattgcgagatggtcggcaagcggacatgcgcctgtcagcaatatgtttgaatttacgacgtcattcggcatgatgcttgttctcgcttttattattatttactttatttacagactgccttcattaggcatgttcacattgtctatcgcgcttttgcttatcgcatatgcaagcatgtttccgacagacatcacgccgcttattccgtcactgcagagcaattggctgtacattcacgtcacgactgcggcgctcgggcaggcgattcttgcgatcagttttgtagccggcgtcattttcctgttaaagcatgtcgaccaatccagaccgggcaaaaaaacgttctggcttgaagtcatcatgtttatactcgtgacgaccgtggcatttatcgccgtcacgtcggcattccggctggcggactacaaagcagaatttaattgggtggataaaaaagaggctaaaagcgtgatgatatatgatatgcctgcgcttgtcggcccgcatgacggagaactgcttacggaaggcgcaatgaagccgcttattgagcttccggccattttttcaggcagaaaggtcaatacggtgatctggtcgtttggcgcaggtctcgttttattcggggcgctcaggctgatattcagaaagagaatcagcgctcttataagcccgctcgtcaaaaatgtgaatctggacttggtcgatgaagtcggctaccgcgctgtttccatcggttttccggtattcacactcggcgcgcttgtgtttgcgatgatttgggcgcagcttgcatggacgcgtttttggggctgggacccgaaggaagtatgggcgctgatcacctttttattttacgcagcgtatttgcacttgcggctgtcaagaggctggcatggcgaaaagtccgcgtggcttgccgtcatcggcttcgccattattatgtttaacttaatttttgtgaatctcgtgcttgccggacttcattcgtacgcatagatgcaaaaagccgatacagttctcaagctgccgcacagtttgttaaaatgaaagtaacagaaggaaagcagggggaaaacgatggatcaaacaaatgaaactaaaatattagtagtagatgatgaagccagaattcgacgccttttaagaatgtaccttgaacgggaaaactatgtgattgaagaagcggaaaacggagacgaggccattaaaatggggctggcatcagattatgatctggtgctcttggatttaatgatgccgggaacggacggaatagaagtatgccggcagctcagagaaaaaaaagcgaccccgattatcatgctgacggcaaaaggggaagaagccaaccgcgtccaagggtttgaagcgggtacggacgattatatcgtcaagcctttcagcccgagagaagtggtgcttcgggtaaaggcgcttttaagaagggcttcccaaacatcttatctgacagccaataccccgacaaaaaatgtactcgtcttctcgcatctatccattgatcatgatgctcacagggtgactgcggacggcacggaggtgagcctgacgccgaaggaatatgaactgctgtacttcctggcgaaaacaccggacaaagtgtacgacagggaaaagcttttaaaagaagtgtggcagtatgaatttttcggagacctcagaacggtggacactcatgtcaaacggctccgtgaaaaattaaacaaagtgtctccgggagcggcgaaaaaaatcgtcaccgtctggggagtcggatacaaatttgaggtaggcgctgaatgaagttttggaaaagcgtagtaggaaagctttggtttaccattctttcactcgtgttaattgttttatttattttaacggtgctgcttctggaatttatagaaaattaccacgttgaagaagcggaaaaagatttaacgcagcttgccgataaaattgcggtcataatagaaaatcatgaagaccagccgcttgccagatccatcacgtgggaactggcggacaatttaacgagcatcgcgatcattcaggatgataagcatgtctggtattcgcccaatgacgataatcatttatcctctattacattagagcagattaaacatgaccgggatctgcacaaggcgctgacagaccgcaataaagtaagcaaacgcgcggtccccaaaaatgccggttcggataatgaacggctgatcgtcggagtgccctatgaaaaagacggcaaaaaaggcatggtctttttatcccaatcgctgcttgccgtcaaagatacgacgaaacatacgacacgctatatttttcttgcggcgggcattgccatcgtcttgacaacgtttttcgcattctttttatccagcagggtgacatatccccttcggaaaatgcgggaaggcgcccaagacttggcgaaaggaaagtttgatacaaaaattccgattctgacccaagatgaaatcggggaactggccattgcctttaatcagatgggacggcagctcaatttccatattaacgcgctgaatcaggaaaaagaacagctgtccaatattttaagcagtatggcagacggggtcatcaccattaatatcgacggcaccattttggtgaccaacccgccggccgaacgttttctgcaggcatggtattatgagcagaacatgaacattaaagaaggagacaaccttccccctgaagcaaaagagctgtttcaaaatgcagtgaacacggaaaaagagcaaatgattgaaatgacgcttcaaggaaggtcatgggttttattgatgtcgcctctttatgcggaatcacacgtccgcggcgccgtggccgtgctccgtgatatgaccgaagagcgcaggctggataaattgcgtgaagacttcattgccaatgtcagtcatgagctcagaaccccgatttctatgctgcaaggatacagtgaagcgatagtggacgacattgcaagcaccgaagaggagaaaaaagaaatcgcgcagatcatttatgatgaatctcttcgtatgggccggctcgtcaatgatttactggatttggccagaatggaatccggacatacgggtctgcgctatgaaacggtaaacctgcatgaatttctggagaagatctcccgcaaattttccggtgtagcgaaggaaaaaggcgtttcgctcacagaggacatctcggtgtctcagccggagtgtgtctttgacgaagacaaaatggaacaggtgtttaccaaccttatagataatgcgctgcgccatacggagtcaggcggaaacgttcatatcgcggctcataccgtaaaagacggactgaaaatcgatatcaaagattccggctcgggaataccggaagaggacctgccttttatttttgaacgtttttataaagcggacaaagcaagaacaagaggcagggcagggaccggactcggactcgccatcgtaaaaaatatcgtggaagcccacggcggctcaattgcggttcacagcagcatcgacaaagggacgacgtttacattttatattccgacaaaagcgcaggatgacgtctgaaattgacgaacaatcttgttccatacgaaacacccgcagaacatgcgggtgttttttgtttttttctcctttaaaaatttaagaatatgttaatataaattcccttccaaattccagtttctcgtaatatagttgtaatgtaacttttcaacgcatttttacgacaaaaaagtgaacggaggggtttcccatggaagaaacctttcagatattatacgatgcataccatcaagatttatatcaatttttattttatatggtaaaagataagtcgcaggctgaagatttgacgcaggaagtgtatatccgcgtcttgaattcctatcatacatttgaaggaagaagcagtgaaaaaacatggctgttgtccatcgcacgccatgtggcgattgactggttccgcaagcagcagacgatcagacagcgtattatgggtacgtttgattgggatacacaagatgtcagagatcagcatttgcttccggacgaactcgccgtacagcatgaaaatgtccgggaaatttataccgcgcttgatcattgcaccattgatcaaagagctgttattatcttgagatttattcagggatattccattcaggaaacagccgccgctctccgcttctcggaaagcaaagtcaaaacgacccaacacagagggctcaaaatacttcggaaacagatggagcttttgagggaggagctaatggatgatgaagtcatattggaacgaagaaagagtagaggagttgttaagacaacttccggcggttagagatcatcgttcacccgaggccatttaccggaatattgaaacgggtaaaccgtacaggaaaaaaccggcccgaagctggatcggccccgctgcagccggcatctgcgcattgtgcatcgctctgattatttctcctcacctgatgacaaacaaatctgccggtgatcttacagctgacagcggtcaagctgaaaaagccagtcagtcagctgctgtcaagccggatcagaagacgtttgtcgtttctaacgaaaacaaaaacaattacattactttggcgtttgccgattcagatacatccgccgtcattccggtcagttttgaaaaaaagaagcctgacgaatcggtttcagaggcattatctgatgcaggaaacttagaagtgcccgaatctttcctctctgtgccgaaccttttggacggtgtgcaggtaacggcggataagaaggatttgcttgtgcaggtaaacggacgtctttctatcgaatcagctgccgattctgatttattgaaaaagatgctgaaagagactttgacatggagtccttacgagcggattaaattgaaaaaggttcaaaacggagacggacaggatttttataaatcttacggcatttccgctgagatgtccgtacataaacagacaaaccgggcgtatttttcttacagcgacagtctgggacaagagtatctcatcccgtctgaacaaacctattattcagtatatcaggctattgacgggatgaagacaacagacggaggctcacagaccgcgagcattatagaagcagatgcgattgcatcggtatcggaaagggaagacggcgagcagctgcggatccaattgtccgaaaaacataaagttgaagattcgctggaaggcattttaatgatcgaagggcttttgttaaccgcgaaggaattcggttattctgaggtgctgttcacacatgcgcacgcaaagaaaatcggtaattatgatgtgacaaaaccgattgctgtgcctgccgcgcctaatccgcttccgacccattaaacgtaaaaaaacccaaaacatatgaatgttttgggttttctgttggttacggaaggtcaatcagtttaacggaaacaatatcctgaaccgaagtcagctcattgacgactttatcatctaaatgtttatcaaaagaaagcatcataatggcttctccgcctttttctttacggcccacctgcatggtagcgatattgatatcgttatcgccgaggatgcgtccgacgcgtccgattacaccagtcgtatcctggtgctggatataaacgaggtggccggcaggatttaagtcaatattaaagccgttcagttcaacgattcgttcaccgaagtgagggatatacgtagccgttaacgtaaatgtgctccggtctccggttacttttacgctgatgcagttatcatatcctgattcattggaggaaatcttctcgctgaagctgataccgcgttcttttgctacaccgcccgcgtttacttcattgaccgttgagtctacacgcggttttaagaaaccggacagcaggctttttgtaataaatgatgtttcaagtttggcgatggtgccttcatattgaatcgcaacatctttgacgggttccttcatacattgtgatacgagacttccgattttatcggcaatttggtgataaggctggatttttttgaattcatctttcgtcatcgcaggcaggttgatcgctgacatgacaggcagaccttttgcaaactgcagcacttcttcagaaacctgtgccgcgacattcagctgtgcttctttcgttgaagcgcctaagtgaggtgtggcgatcaccagcggatggtcgggaagctttgattcaactggcggttccacttcaaacacatcaagggcagcgcctgcgacatggccgctttccagcgcttccaaaagcgccgcttcatcaataatgccgcctcttgcgcagttgataagacggacgccttttttcgttttggcaatggtttctctgttaagcaatccttttgtttcctttgttaaaggcgtgtggacggtaatgatatccgcgctttcaagcacttcttcgaatgtccggctgtttacgccgattttgccggctctctcttcggttaagaaaggatcgaatacatgaactgtcataccgaacgctctggcgcgctgggcaatctcgcttccgatccggcccagaccgacaatgcctaaagtctttccgtagagctccgccccgacaaaagccgtccggttccattctcttgattttactgagatattggcttgcgggatgtgtctcattaatgaagaaatcatcgcgaatgtatgctctgccgttgaaatggtgtttccattcggcgcgtttatcacgataactccatgttttgtggcctcatcaatgtcgatgttgtctacgccgacaccggctctgccgacgatttttaaagaagtcatctttttaaacaattcttcggttacttttgtggcactgcggactaacagggcatcaaaggtatgtaattcatcttctgcatccgcgacgtttttttgaacaatttctataaagtctgattccatcagcggctttaagccgtcattgctcatcttatctgagaccaaaactcgaaacattgttagatttcctcctagtttagctgactaaatatctgataatttatcatattctcaatagagtgtcaatgtgtattgacgcagtaaaggagaaaaggaaaccgctgaatcagctgaaattgggcttccccaatattttatttaaatttgagcagttctctatacaattacaatttgatcatatataatgtgaataaattcataagatcaatcttcggggcagggtgaaattccctaccggcggtgatgagcgtcacgctctaagcccgcgagctgcttcggcggcaggatccggtgagattccggagccgacagtatagtctggatgggagaagatggaggttcagcagacgttttgatgcttatatcaaacgtttctttgccaagccttagtaagctcccgctttttaacaaaagcggtttttttattggggcgcaaaagaacctttcctcttttcgagagatttgatcgaaaaggagagagcattgtgaaagtaaaaaaattagttgtcatcagtatgcttagcagtattgcgtttgtgcttatgctgttaaatttcccgtttccggggctgccggattacttgaaaattgatttcagtgacgttcctgcaattatcgctattttggtttacgggcctgcggcggggattgcggttgaagcgattaaaaatattctgcagtatatcattcaaggaagcatggccggcgtgcctgtcgggcaggcagccaattttatcgcggggacgctgtttattctgccgacggcgtttatgtttaaaaagctcaattctgcaaaagggcttgcagtgagcctgctggccggaaccgcggcgatgaccgtgctgatgagtattttgaactatattcttatcctgcccgcgtatacttggtttttacattcaccggcattgtcaaacagccagttgaaaacggcggttgtcgcaggaattctgccgtttaacattgtaaaaggcattatcatcaccatcgtctttacgttcatctttacgaagctgaaaccttggattgaacaaaaacgcagcatccaaacacaataaaggcttaaagcgtccgctctgtgaagaacagccggacgctttttttgtttgtgctgatcggcaaaaaaataagactccggccgataacagccggagtcttattcaggacgaaaaagctcctctcacggggagggcttttttattcgtatttcagcgggtcgccttcgaacggttcatccgcaactttgattgaatcagtagggcatccttcaaatgcgtcaatcatatcttcttccagaacttccggaacttcgacgacacctttattttcgtcaagcgtaacgaacgcaatgccttcatcatcataatcataaatgtctggtgccgcagctccgcaggcgccgcatgcaatacacgtatctttatctacaattgtgtactttgccatgaataaaacctcccagattgttcgtgttggaacaaatggtttaccttatatatttttaaatataacacctattcctcttacttattgtaatgatgttagtgtcaaatttcaacagaaaaatgattgagaatgcttatcacataagggattctctttagcacttccccctaaaagatgactttaaacgtcaaatttatatgaaaatctgttaaaataaaaagaaccaaaaaacgaaacttgtcacaaaagaaatgtaggtgtgtttagattggcgataaactactttgataccgtggttctcgactgtctggacaaaatagacggcgaacggactccgagtgctgtgtttcatttattaaaaggaaaaaagtcgtctcaaaccattcaggatgccggcttatttcagatcgctaaatatttcggcatggcttcacagtgtgaacgcggcgatattgcggcttctatgcatagactcaccgagaactcatacatcacagccggaaaagaagagggaacgcggaaagtgactgcgcgcggcgttcaaaggcttgaacgggcgtttgctgagcggccttggccgaagcactgccacggcgcaaattatcaaacgcctgccgtcatcctgtggaggcggctttccctgctcattcaagtcctgtcaaacaaagagcatcaatgcagtcaatatatcccggttaccaacgatgtgcagacgctgagatgggtcaaatggttcatgcggaaaaacagagatgctaaagagctttccgtccaaatgcatgacgcgctgtttcagcttctgcaaggcgtaagtgaacggcaggcgcttatttttgtctattctttaacttcattcaacagaatcggcaaaacgaataagcagctcgctctccagctgaacgaagatgaatggtatgtgtccgtccagttttggggagcggtacattatgttattcaatcgcttccgcaatgtgcatatcccgctctgcgcgagctgttgtccgatctgcaggcggaaagcgcgctgacacagtctgccagaaaaacctttgagctgttggaaaaagggtttccgattgaacggatcgccgcggtcagaaatttaaaaaccgccacaatcgaagatcatatcgtagaaatatcattgcatcagcctgcattttttatagaacagtatctttctgaagaggaacagcgtatgataacggcatttgcaaaacagcatcaaacaaataaaattaaacggattcgcgaaggaatgcagatgcgcttcagctatttccagatcaggctggcgctggcaaagacggtgaatcagcatgactgagctgcataaagctttatccagatattttggtttgcattcctttaaaaaagggcaggaagagattatgactagcgtgctccaaaaaaaggatacgatcgccatgcttccgaccggcggggggaaatcattatgctatcagctcccgggttacatgatggacgggctggtgctgattatttcaccgcttctttcattaatggaagatcaggtgcagcagctgaaagcaaaaggagaaaagcgggttgcggcattaaacagcatgctgaattccgcagagcggcattttattctcagcaacatcagccggtataaatttctctatatgtctcctgaagccctttcttcaccttatgtactgaaccgtttgaaaaacgttccggtcagtttatttgttattgatgaggctcattgcatatcggaatggggacatgatttcaggcctgattattcgaagctcgggcctttcagacaggcactcggaaagccgcctgtattggcgctgactgcaacagcgacaaaagaaacgctcagagacgtgacggatgtgctcggacttgagcatgcggtgcgtcatctttattcagtcaaccggccgaatattctcctggcggcagaacatttggctgataatgccgaaaaaataaacaggctcacggagcttgccgaaaagcttgaaggccccggtatcatatattgtccgaccagaaaatgggcggaagagcttgcggctgagctgaatgaaaaaacgggaaagcggacggattattatcacggcggaatggatacaggggacagaatcttgatccagcagcaatttatccataaccagcttgattgcatctgctgtaccaatgcgttcggcatgggtgtggataagtcagatatccgctttgtcattcacttttatcctccccaaacggctgagggctttatgcaggaaatcggcagagcgggacgcgacggcagcccgagtgtcagtattttgctgagggcgcccggcgataccgagcttcagcagcagattattcagacagaaagcctgtctgattatgatctggaaggcattttggccgtcatacgggatgccggtacggatgatgagcgaaagcttcgggacgttctgatcaataaaggcgtccaggaaacacaggcgcgaacggccgtccatctgtatctgcaaggaaaaaccacaaaagagcagctgcaggaagaactgacataccgcgtggaaaagaagctgcgtaaaatgaaccgtttttcggcgttattagagcggaaagaatgtataagaaaagcgctgctgtcttattttgatgaatcgtatgagcctgaaggccaaaccggacaatgctgcagcagctgcggacttgatctggctccgtacgagcaaaaaggagaacggaaaaacatggaacggtttgaagattggaagctggaattaggccggattttcggttcagagtctgcgggtgagttcagctgagacggcaaagcgaattgatccagcagctctcagaccgggagattgtgatacagctgtatgccacccaattgctcatattggcggtttcagctgttatcggctttttctttttcaccgacattcacgattttttaaagctgtggcatatacgtgacgataatatcatatggtacggtgtaactcttgccgtccttgtcatttttgccgatctggcggtgatgaaatggtgtccttcgcatttatatgatgacggcggcattaatgtattgctttttaagaacaggccggttctgcacattttgtttttgacgcttctcatttcgttcagcgaagagattttgttcagaggcgttctgcagacacatatcggcttatgggccgccagcttcatttttaccgtgcttcatttcagatacttggcgaagtggcttctgtttatgatggttgcgggcatcagtcttttgctggggcttatctatgaatggaccggcaatttattcgttccggttacagcgcattttattattgatgcggtatttgcctgtcagatccgttttcaatatgttaggaggggtttgcatgacggaaatgtcaagagttgaaagaagaaaagctcagcagcgtgccgagcagcaggttgccgcggccgcggatgaacaaattgaatatcttgaagacagcctcccgacaagacaatctgtaaaagaggagcgtaaaaaaaaggaagagcaggtgaaggaaaaaaccaaaacaaaaacgccgctgttcacttttctgaccgtcctgttcattatcgtaacaatcggtgtctttttcggtcttctttatatgacgaacagcagcagatttgacccgaaggactatgaagatgtcttcatagaccacagtgaaagcgcgcctgccgttattccgaaaggcgctcagaaagatacgtcagaaaccgctcttttagaacaaccgaaaaaaaagtctgacgacaaagataagaaagaagcggctgcatctgaaaaaacaaaagaaaaaccaagtgaaaaaacacctgaaaaaacggaaacgtcctcagaaaaacaagtaaagccgacagacaccgaatacgcggagacaaaacagcagtctccgccggctgtccgtgaaaaagcggctccggctgccgcaagtgatcaagctgggactgtcccgaaaaaagtgcggaccgtacagcatactgtacagccgaaagaaacgctttaccgcatttcaatgaaatattataaaagccgggcgggcgaagaaaaaatccgcagctacaacggattaaacggaaacgacgtgtacaccggccaggttctgaacattccgctgtctgattaaaataaatgcatgttttcaccgcgtttttcatatagtgtactaatgaaaacggacaaggtgtgaagcgcatggattctttatggaagcaattagaccgatttgctgacggaccgacgaaacaaatgcttcaggcgctggtgaaacggaaattaaaatacgaaaattatgccgcacaatgccgaagatggcagtgggcgtccctcgtttgtttttccctgatgtgcatactgctgatgtttaaaagctttaatgccccccaagcctctccgcagctgattctgcaggaaatattaggccatacggtttatttgtgctggattatggcttccgcttttgcgtattgcacttcttattattttaaaaaaaaggaagaaaaagctgagggtgaatttcataaactgagatgtgaaattatccaaaaaagcacggatttatggccccagcctgaaaaatggagggcgagagaatctgtttttcacttgatgaaacatcggtatgatatcaatctttattttgaaagcaaataaaatgaggcgttttccggaaaggatagaaacgtctttttttgtttgtccgtctaatgtaagacaatgacagaatggagagtgcgtttatgaagctaacagcgggaattctcggctcattggcgggagcggctgcggttatggcggccgtcatgtacaaaacggcaaacggcagccatctgaaaacacatacatttacgcttgataaaatgaaagggatgaagccgctcaccatcttctttatatctgacgtgcaccgccgtttaattgatgaaaagcttctccgcgaagcggcagtttataagccggatgccgttttgctcggcggtgatttggcggagggcggagttccttacgccagaattgaagaaaacatcaaacgtctgacggctctcgcgcctgtcatttatgtgtggggaaataatgattacgaggtcagccagcaaaaattgctctcacttttacgggcatacaaagtgattccgctgagaaatgaatcggttcagtttgcttataaaggggaaaccgttacgatctgcggggtggatgatatcaggatgatgatggatgattacgaagctgcaatcagatatacggatgctgataaagtaaaccttctgctttgccataaccccgacatccatgagcagatgagggagtcagacgggattgacgctgtgttcagcggccatacgcatggcggccaaatccgtttcggccggttcgggccgtacgaattgggcggggcgggaacggtaaaaaaagcgcattatctgatcagcaacggctacgggacgacaaaagttccgctgaggctcggggcgaagccggagacgcatatgattacgctgtgcgggccggatgagccgttttcctgaaacaaatccggccgcggtgataaaaaacggcattctgcttgtcttcccgctgtacacggtgtaaactgataacaaattaagaacctatgactcatttattcatatactgtgttatatgatttgtgtgcaagaagaggcaggagggaacattatgcggcttgagcgtctgaactataataagattaaaatctttttaaccctcgacgatctgactgatcggggactgacaaaagaagacctctggaaggactcgtttaaagtccaccagttatttaaagatatgatgaatgaagcaaatacagagctcggctttgaagcgaatggtccgatcgcggtggaagtatattctcttcaggcacaaggtatggttgtgattgtaacgaaaaatcatgacgcggacgcagaagatgacgaatatgacgatgattatatcgagatgcaggtcaaacttgacgaaagcccggatattatttatcagttccattcgtttgaagatatcattcagcttgccggaagccttcaccgcatcgggattaccggcggcaccgtctaccattatgagaaccaatactatgtaagccttgaagacctcggctcccgttccgccgaaggtgtcatcgcggtgctggctgaatacggacacccggcgacaattacgatttacaggctccatgagtacggaaaactcatcatggacggcaatgctgtggaaaccatccagaaacatttttcataaaaaagatttgaaacggcagctgttttcagcggccgtctttttttaagcgaaataatggaaaaatcattgtctttcttctatgcacggagatattgaaggtgtatactagtcactgaaagggagcatgagagaaacagaagattttaggaggttaactcaaatggcagccgatcgattcaccggtcataatgaagaagacaaacatgatgtattaaaatcaacccaaaccgtaatacataaagctctggaaaaattggggtatccagaagaagtgtatgaactgctgaaagagccgctcagattattaacggttaaaattcctgttcggatggatgacgggtctgtgaaaatatttacaggctatcgtgcgcagcacaatgattccgtaggtccgacaaaaggcggcattcgttttcacccgaatgtaactgaaaaagaggtgaaagcactttccatctggatgagtttaaaatgcggaattattgatcttccttatggcggtggtaaaggcggaattgtttgtgatccgagaaatatgtcattcagagagcttgaaaggctgagcaggggatatgtaagagcaatcagtcagattgtcggaccgactaaagacgtcccggcacctgacgtatttacaaactcacagattatggcttggatgatggatgaatattcaagaattgatgaatttaactcacccggctttattacgggaaaaccgcttgtactcggcggatcccacggcagggaatcagcgacggcaaaaggcgtcaccatctgcataaaagaagcggctaagaaaaaaggtctcgatattcagaacgcgcgtgtcgtcgtacaaggtttcggaaatgcgggcagctatctggccaagtttatgcatgacgccggcgcgaaagttgtcggaatttctgacgcgtacggaggcctttacgatccggacggtcttgatattgattatctgcttgaccgcagagacagcttcggaacggtgacgaagcttttcaatgacaccattacgaatcaggagctgcttgagctggactgtgatatacttgtcccggcggcgatcgaaaaccaaattacagaagaaaacgctgaccgcatcaaagcgaaaatcgtggtagaagcggcaaacggaccgacgacactggaaggaacgaaaatcctgacagacaaaggaacgctgctggttcccgatgttctggcgagcgccggcggtgtaacggtttcttatttcgaatgggttcaaaacaaccagggcttctactggagtgaagaagaagtcgaggaaaaactggaaaatatgatgataaaatcgtttaataatatttatgaaatgtcccaaaaccgccggattgacatgaggcttgcggcttacatggtcggcgtgcggaaaatggctgaggcttcgcgtttcagaggctggatataaaccaatcgtttgcataaacaaaaaaaatctcctatgataatataggagattttttatatgagtggaaacttatgatggaaatgccaatcgcaggagttgaaggacatgacagaagaaaaagcaattataataggcggaggtccttgcggattatcggcggctatacatctgaagcaaattggcgtgaacgcgcttgtgatcgaaaaagggaatgtcgtaaacagcatttataactatccgacgcaccaaacttttttcagttcaagtgaaaaattggagatcggcgatgtcgcctttattacggaaaacagaaaaccggtccgaatacaggctctctcttactacagagaggttgtcagaagaaaagagctgcgcgtaaacgcctttgaaacggtggagcgcgtaacgaaacaggaagacggccgttttcttgtagaaacgtcaaaagaccgctacctcactccgttttgtatcattgcgacaggatattatgatcatccgaattatatgaacataccgggtgaagggcttcctaaggtatttcattactttaaagaaggccatccttattttgataaagatgttgctgtgatcggcgggaaaaactcaagtgtggacgcggctttggaactcgtgaagtccggtgcgcgcgtcacggtgctctacagaggacatgagtattccccgagcatcaagccgtggattctgcctgagtttgaggcccttgtcagaaacggcacaatccggatggaattcggcgcttgtcttgaagaagtgacggaagatgaaatcattttccgctccggccgaaatgagacggtccggctgaaaaacgatttcgtatttgccatgacgggataccatcccgatcacggtttcctcgaaaaaatcggtgtgcagattgatgctgaatcaggccggccgtttttccgggaagaaacgatggaaacaaatgttgacggtgtttttatcgccggagtcattgcggctggaaataacgccaatgaaatttttatcgagaacggccgttttcacggcggcttgatcgcaaacgaaatatcaaaacggctgggtgcagagagcatatgatcattcatatgctcttttttaaaaaattgaaagatgtaaaaatatgaacaacatggtaccatagatataggaatataaaggaaagaggttgcctgatgtttgcaatcatctctgcaggaattgctcccggcattgcgctgttaagctatttttatttaaaagatcagtatgacaatgaacctgtacatatggtgctgaggtctttttttctcggggttgtccttgtgtttccgaccatgtttatccaatatgttcttgaaaaagagcatgtggggggaggaagctttttcgtttcgtttttgtcttcgggatttttggaagaatcggtgaaatggttcgttctgatgatcagtgtgtacccgcatgctcattttgatgagcattatgacggaatcgtttacggggccagtgtgtctttaggctttgccacgcttgaaaatattctgtatttattcggccacggcgttgagcatgcttttataagagcgcttctgccggtctcctgccatgcgctgatcggagtgattatgggattttatctcggaaaagcccgcttttcgcagaaaaaagcccgtgtcaaatggcttgtgatttcgctggccgtgccttcatgtctgcacggttcttacgattttattcttaccgccctcaatcattgggtatattatatgctgccgtttatgctgtttttatggtggttcgggctgcgaaaggcaaaaaaagcacgctccgtcaatatgatccaagtgtgaagaaaccgcgcatcgcgtgcggtttctttttttatgccttgatgagggataagaaggaaacggtgtataaaaatatccgcgtgacagacaatacgggtacactttaaattttgcagtaggaggcttgaagagatgaagtgcaaaggagcctttatggcatgtctcattctattttctttcgccgccgctttcttcgatcatcatgaaacggttcatgcgttttcaaatcaagtgattcaaagaggcgcgacgggtgatgatgttatagaattgcaggcccgtcttcaatataacggattttataacgggaaaatcgatggtgtttacggctggaccacatactgggccgtgagaaattttcaggagaaattcggcatgaagccggttgacggcctcgtcggggcgaaaaccaaacaggtgctgatttcaaaatcaaaatattaccgtgaatatgtaatggagcagatccaaaaagggaatacgttcactcattatggcaacgtcccattggaaaaccaaacaaaaccgagagccggagcgcagaagcctgcggaaacgaataagcctgctcaaaagccgcaaaacaatacaggcggtcagtcaaatcaaaagcaaaatacgacagcggctaatatgcctggcggtttctcaaacaacgacatcaatcttctggcgcaggctgtgtacggggaagcgcgcggtgagccgtttgaaggacaggttgccattgccgcggttattttaaaccgtattaaaagcccgttatttccgaatacggtggccggcgtcattttcgaaccgctcgcgtttaccgccgttgccgacggccaaatatacatgcagccgaatgaaagagcaaaagaagcggttcttgatgcgattaacggatgggacccttctgaaaacgcgctttattatttcaatcctgatacggcgacaagcaaatggatttggggacgtccgcagattaaaagaatcggaaagcacattttctgtgagtaaaagtacgcaaaatgaggtgttaacatgattagaggaatcattatcgctgttctcggtgtcgcgatcgccgcaaccggatactggggatataaagagcatcaggaaaaagatgcggtccttctgcacgcggaaaataattatcagagggcttttcatgaactgacgtaccatgttgatcagcttcacgacaaaatcgggacgacgcttgcgatgaacagtaaaaaatctctgtctccggcgctcattgatgtatggagaattacatctgaagcgcataacaatgtgagccagctgcccctgactctcatgccttttaataagacggaggagtttttatccaatataggagatttcagctataaaacatccgtccgggatttagaccaaaaaccgcttgataagaaagaatatacaacactgaacagcctgtacaaacaggcggagaacattcaaaaccagcttcgcagcgttcagcatctcgtcatgagcaaaaatttacggtggatggatgttgaaatggcgctcgcctctgacaaaaaacaaagcgataatacgatcgtcgacagctttaaaacagtcgaaaaaaatgtaggcgctttttctgaagacagcatcagccccacatttacgggagcaaatacagaacgaaaaggttttacgcatctgaaaggaaaacaaattacggaaaaagaagcggtaaaaatcgcacaacggtttgcgcctgatcataattattccattaaagtggtcaaaagcggccggaagacgaatcgcgatgtatacagtatccgcatgaatgacgcggatcacaaatcttttatctatatggatattacccaaaaagggggacatcctgtctatttgattcaaaaacgggccgtgaagaaacaaaagatcagcctcaatgaagcatctaaccgggctgtcgcgtttttaaagaaaaacggatatgaaacaaaaggtctcgaaattgatgaaagcgcgcaatataataacatcggcgtcttttcttttattcccgtggagaaaaacgtccgcatttatccggaagccatccgaatgaaagtggcgctggatgatggtgaagtcgtcggtttttccgcgcgtgattacctggcggcgcaccgcacgagaacgattccggctcccgctttgtcagctgatgaagcgaaagcgaagctgaataaaaatgttgaagtgcgggagacccggcaggcgctgatcacgaatgaactcggtcaggaagtgctttgctacgaaatgctcgggacgatcgggaaagacacgtatcaaatgttcattaatgcggacgacggaaaagaggaaaaaatagaaaaattaaaaagcgcagagcctatatataaagacctataaaaataaaggaggaaaggactaaaagtcttttcctttttttcattacatgctttaataaaagcataaataatgaaagagtgaaggccatgatagctgtcggagattatatttggattgaatacatagagaacaatgagcccaaaaaagcgaggagtaaagcagtaagcgttgaaaacggcgaactccacatctcatatcccgtcgatctggattcgggacggacggtctttttgcataaaggattggaaataacagcggaatttatggggaatggccaagtaccgtatcaatttaaaagcataattaaaggaaagaaaaaagaacccatcccgatgatcggattggacatccccctcaggaggaaatgaagcggattcaaagacgccgatacgtccgtgcagacgcagtattggatgtatccgtcaaattggaagcgaaaaaaaccgcttttcaaacggtttcctctaatatcagcgccggcggaatcgctgttgtgatgcctgagcatatttccgcggaaccaggtgaaaagctgtatgtctcattttctcttcccggcaaggaaaatggggcggatataacggccgaggctcttacccagcggattttttatgatgaaaaggcggataaacaaaaaatgacgcttgaatttacagaaatcggccccgcagcacagcagcttttactccaatattgtatgcgcgcgcagctgcagcagagaagaaacagtctgtcggaataaacagcagcgcacttttccatactaatcctaatggaggtgcgcgtgtatgaaaacatttgaacgtctgctggtcaaattggtctgcattcagcttataattttgggcgcggtgcagtttttgcttcattatcagcctattgaaccttatatttcgaaagctgtgaaatatgagggagttgataaaatggagaaaaaagaatggattgaaacggtaaagcggtaaatcagctcaattttttcgccccttttccggcagttcatgatacaatccatagaggagtaaagagcaaggagagagattatggacaagaaattatcaattgcgatcgacgggccggccgctgccggaaaaagcaccgttgctaaaatagtagctgagaaaaaatcatatgtgtacattgatacaggggcgatgtatcgtgccattacatatacggcactcaagcagaatgccgatttaaccgatgaagccgcgcttacagagcttttgaagcgtacggaaattgagcttgtatccgctccggaaagacaaatcgttctcgtaaacggagaagatgtgacagaagaaatccgaaaagacgaagtcagcaaccaagtatccatcgccgccaagcataaaggcgtcagagaagaaatggtcaaaagacagcagcagctcggacaaaaaggcggtgtcgtcatggacggccgtgatatcggtactcacgtgctgcctgatgccgaagtgaaaatttttctgctcgcgtccgtagaggaaagagcgaagcgccgatatgaagagaataagaaaaaaggctatgacgtgaattacgagacgctcattgaagaaattgccagacgcgacaaactcgattcagagagggaagtttccccgctgcgcaaagcggaagacgcgattgaaatcgatacgacgtcactcagcattgccgaagtcgcaggaaaaattctggagatcgtcgaacagaaatcacgttaacttcgggcggagcgctttttaatttttttcaaaagacaagatgttattgcttgacaaaccagtccttttattagaagttaatactaataaaactttttattgatcattcaaaatcttttttggatgattctttaatacatattcggctgaaaagcggacattcacatgttcagctttcaaaccgtattaattaagctgtgtaggtttggaccaaggaggttattcaaatgacagaggaaatgaatcaaattgatgttcaagtgccagaggttggagatgtagtaaaagggattgtgacaaaggtagaggacaagcatgtagatgtcgaaattgtcaatgtcaaacagtccggaatcattccaatcagtgaattatcaagtcttcatgtagagaaagcatcggatgtcgtaaaagttgacgacgagcttgacctgaaagtaacaaaagtggaagacgatgctttgattttatctaaacgtgccgttgatgctgaccgcgcttgggaagaccttgaaaaaaaattcgacacaaaagaagtgtttgaagctgaagtgaaagatgtggtgaaaggcggtctcgtcgttgatatcggcgttcgcggcttcattcccgcatcacttgtcgaagctcatttcgtcgaggatttcactgactataaagggaaaaccctctctcttatcgtcgttgaactcgaccgtgataaaaaccgggtgattctgtcacaccgggctgtagtggaaaaagagcagacagccaaaaagcatgattttctccaaacgcttgaggttggaagcgtgcttgaaggaaaagtgcagcgtctgactgatttcggcgcatttgtcgacatcggcggaattgacgggcttgttcatatttcgcagctgtctcattcacacgtcgaaaaaccgtctgacgtggtggaagaaggtcaggacgtaaaagtgaaagtgctgtccgtagaccgcgataacgagcgtatttctttatctattaaagaaacgctgccgggaccttggagccagatcggcgaaaaggtaaaacagggagatgtgcttgaaggaaaagtgcagcgccttgtaagcttcggcgccttcgttgaaattcttccgggcgtggaaggacttgtgcacatttcgcaaatttccaataaacatatcggaacgccgcatgaagtgcttgaagaaggacagactgttaaagtgaaagtgcttgacgtgaacgaaagcgaagagcgcatttccttaagcatgcgtgagcttgaagaagcgccgaaagccgatcaggaggacttccgtcaataccaggcgaaagaagagccgagcaccggcttccagcttggcgatttaatcggagacaagcttaataaattaaaataaattggtgataaaacgtgacacgagcagaacgaaaaagagaacatataaatcatgcgctgtctaccggccaaaaccgggaaacggggcttgatgatattacgtttgttcatgtcagcctaccgaacctagcattggaaaaagtggatatatcaacgaaaatcggcggactcacaagcagttcgccgatttttatcaatgcgatgacaggcggcggcggacagcttacatacgaaattaacagatcgctggcaagagccgcgcgcaaagccggcatgccgctggctgtcggttcgcaaatgtcggctttaaaagatccctccgaacggtattcttacgagatcgtcagaaaagagaatccggacgggctgatatttgccaatttaggcagcgaggcggatgccgagcaggcaaaaagagcaattgatatgattcaagcggatgccctccagattcatttaaatgtgattcaggagatcgtcatgccggagggagacagaagctttaccggcgctctcggccgtattgagcggattgcggcggaagcgggagttcccgtttttgtcaaagaagtcggcttcggaatgagcagggagtcggcacggcagttatttgatgccggtgcggcagcagttgatgccggcggatacggcggtacaaatttctctaagattgaaaatatgcgcagagagaaggcgcttcaattttttaatacatggggaatttccactgccgcaagcttagcggaaatccactcgctctccgctgatcaatcaattatcgcatccggcgggctgcaaagtgccctggatgtcgccaaatcgattgccctcggcgcttctggcgcgggaatggcaggcactttcctgaaagctctcacctccaaaggagaagaggggctgtttgacgagatgacggtgcttttacaagagctgaaaatgattatgaccgccctcggatgccaatcggttgcccaattgcaaaaggcgcctttggtcataaaaggtgacacacatcactggctttctgaacggggaattgacacatcccgtttcagcagacgttaaaaggcatgcgaacccgcatgcctttctctgttttttacgattttctttttcggaattcaccgttttgttcaaggctcgtcgctcctttatggtgaattgaatcatcgcgatcagattccacccggcgggaggctttcagttttttctcctgtctgtcttttcccatttttatccgctcctttcaggcataattggtttaaaaaatgcgttcccgctccatactggtcagaggaggagcgattatggaaccgttttattattactggtcaatgtggtttttatggatacttgcgacttttatttttgccaaaacaaaaagccgtttttacgtatcagtctttattttgactaatatgatggcaagcatacatcagataacggcttattttacgctgaacgcggcatatgtcatgttttttgctgcggcatttgtttatgcgggaagcctcggcatgcataaacggctccgtcatattgtgattcatctgacggcggctgcggcgtacggctttatttttctttttgcattatatgaccctgtttggtttatcataaaacctgaatgggcagcggttatactgcttaccgttattacgctttctgttgaggggcggttccctgagaggctttgtctttttgttctcggcatgtgccagggggagttattgtatgctgcggtcatccgcaacattgcgggggcagcagccgtcggtgattataaatggctatcaggctgttcggcgggagtgattcttctcgtcgggctgactacatatgaacagcttgcggcgcgcatcagccaaaaaagcaaaaagcagggcaaaggagcgacaaaaatgtcttgaaaacagacggagactgttacatgaatacgaaacattttgaagaatacattgtgatctcagtgaaaactgatataataaatgagttaagcccttctgtttgaagggttcttttcatagcgaagatgattattaataaccggttgaacaattttttgtgaaaatgtaagcggctggattgaaaggaagggtactatgggtaaacctgtcgtagccattgtcggaagaccgaatgtgggaaaatccacaatctttaaccggattgcgggtgaaagaatttcaatagtagaagatacccccggagtgacgcgggaccggatatacagttcggcggaatggctgaattatgattttaacctgattgatacgggcggaattgatatcggagacgagccgtttctgacacagatccgccagcaggctgaaatcgccatggacgaggctgatgtgatcatctttatggtgaacggccgcgaaggtgtgacgtctgcggatgaagaagtggcaaaaatactgtaccggacgaaaaaaccggtcgtattagccgttaataaattagataataccgaaatgagagcgaacatttatgacttttatgcgctcggctttggagaaccgtatccgatttcggggacacacggtttaggattgggagatttgctcgatgcttgtgccgagcattttaaaaacattccggagacgaagtacagtgatgatgtcgttcaattctgcctgatcggccgcccgaatgtcggaaaatcatcccttgtcaatgcgatgctcggcgaagagcgggttatcgtgagcaacgtagccggaacgactagagacgctgtggatacggcgttcacttacaatcagcaggaatttgtaatcgttgacacggcgggaatgagaaaaaagggtaaagtatatgaaacaacagaaaaatacagtgtgctgcgggcgttaaaagccattgaccgctcagacgtcgtcggcgttgtgctgaatgcagaagaaggcatccttgagcaggacaagcggatcgccggatacgcccatgaagccgggaaagccgtcgtcattatcgtaaacaaatgggatgccgttgataaggacgagcgcacgatgaaagaatttgaacagaatattcgggagcatttccaatttctcgattatgcgccggtgctgtttatgtcggcactgacgacaaagcggattcatacactcatgcctgcgattattaaagcgagtgaaaaccactctctccgtgtgcagacaaatgtcttaaatgatgtcatcatggatgcggtcgccatgaatccgactccgacgcacaacggctcccgtctgaaaatttattatgcgactcaagtcgctgttaagccgccgagcttcgttgtttttgtcaacgatccggaactgatgcatttttcttatgaacgctttttagaaaaccgaatccgggacgctttcggatttgaaggtacgccaattaaaatatttgcaagagcaagaaaataaaaaggtgtgatacagagatgaaaaaagtggcaatgcttggagcgggaagctggggcactgcactttctttagtgctggctgataacggacatcaagtcatgatgtggggacaccgtgccgaattgatcgatcaaatcaacgaactgcatgaaaacaaagattacctgccgggtgtggagctatcaagttctatcatcgggacagccgatttaagcgaggctttaaaaggagctgacttcatcattgtggcagtaccgacaaaagccattcgggaagtgctgaaaaaggctctgccgtatatcccgaaacaatcgatttttgttcatgtcagcaagggaattgagccggattcgcttctccgcatttcagaattaatggaggaggagctgcctgaggagtacagaaaagacatcgtcgtgctttcagggccgagccacgctgaggaagtcggattaagacacccgacgactgttacatcatcttcaaaaaatatcaaggctgcagaagcggttcaggatttattcatgaaccagcatttccgcgtctatacaaatcccgatatgatcggtgttgaaatagggggagcgttaaaaaatatcatcgctcttgcagcggggattacagacggattgggatacggagataatgcaaaagcggccttaatcacccgaggtcttgctgaaatcgccagactcggcacaaagatgggcggaaatccgctcaccttttccggcctgaccggcgtaggcgatttaatcgtgacgtgtacaagcgttcattcccgaaactggcgcgccggcaacctgctcggcaaaggatataagctggaagctgtcctggataagatggggatggttgttgaaggcgtgcggacgacgaaagctgcgtatcagctgtctcaaaaatatcaggtgaaaatgccgatcacagaagcgcttcaccaagtattatttaatgggcagaaggtagaaacggccgtagaatccttaatggccagagtgaaaacccatgagatggaagacttggtcaacacattcgaaaaccgggtgaagtgacaataacatgccgtcagcatattctgaagtgacgaaagtccaaaacgcagaactctccggctgaaatcgcttaaaacatttgctgatttaggcagaagaggatgcagacgtacgcatctacgcatactatagcatcgaagtccaagagagtgtatctcagacgtacaggtgaatatagtcaacttgactgaagcaaagtccccctctttgcttcagttttttgttttttcaatagatggaaaacctgttgatcttttcaacatttgtatattaaaatgaaatataacgcttacaatgatgggacggggggcacgaacgtgagtgtggcattgatgaaaatgtggtttgcgcttggtgctatgggattaatgtttgttgcggtcgcctttatttatgtcagcaggtacaaagtgaaaaacaaactgataaaagcagcggtttcttcactcgcttatgcctgcatggtcatctcgggattgatcgtgttaatggtcgttttcagcgggcctgtcaatgaataaagccaaaagggggcgcggaatgcataagttaaaaatggccgtcataacggcaatggcggtgcttctgctgtcgggctgtctgtaccctgaagcaaaaaaaactgaaaataaagtatcttacaaacatcagcttcagcaggtgcaagcggcagtggatgaatttaaaaaggcgaacggcggacttctgccgattcagacaaaagatatgaaaacaccgctctatcaaaaatatccgatagattttaagcggctcgcgcccagatacatagaggagccgccggcctcagcttatgaaagcggaggaatgtaccaatacgtgcttgtcgatgtggaaaataagcctaccgtcaagctggtcgatctccaaatggcggaagcaatccgcgacatgaagctgcgtgtcaaaatgtatcaggaaaagcatacatatcctccctatgaggacgctgtttcaaaaggcctgttcactttaaataaaaaaaagctcggcatgaaagactctccttcagtcaaaagtccggtttcaggcacgtctctgccgcttttaatcggcgctgacggagaaatctatgccgactatcgcgtcgatctcgcccgctgcctgaaggaaaacaaaaagaaaatcaaaccgggcgcggaaattcaggatattttatggaaagagactcctttcgtcccggccttttcagtcacttacaccgtaaatgaaaaacaggaacccgtttttttagaaagtcaaacgaaacaggaatgaacctttttcccgcgcatacaaatagggagaaaggtttttttgattttgatagaaaagactgcctgaaaattttctaaagatgtcatattgaaataggacaacgtcatacacatatagtgtcctgtatttgattggagaatggtgaatgaaaaatgataaggataggaagtccgggaggggatcacttggaaaaggtcgatattttcaaggatatcgctgaacgaacaggaggcgatatatacttaggagtcgttggcgctgtccgtacagggaaatctacattcattaaaaaatttatggagcttgtggtgctcccgaatatcagcaatgaggccgaccgagcgcgggcgcaggatgagcttccgcaaagcgcagcaggaaaaacgataatgaccacagaaccaaaatttgtcccgaatcaagccatgtccgttcatgtcgcggaaggacttgatgtcaacatccgtcttgtggattgtgtgggatatacggttcccggggcgaagggatatgaggatgaaaacggtccgagaatgatcaatacaccttggtatgaagaaccgattccctttcatgaggctgcggaaatcggtacgagaaaagtcatccaggaacactccacaatcggggtcgtcattacgacagacggctcaatcggcgatattgcgcggggcgattacgtggaagcggaagaaagagtcatcgacgagctgaaggaagtcggcaaaccgtttattatggtcatcaactcggtaaaaccgtaccacccggaaacagaagcgctcagagctgaattaagcgcgaaatatgatattcccgtcctcgccatgagtgttgaaagcatgcgggaaacagatgtgttaagcgtcctcagagaagcgctttacgagttccctgtgctggaagtcaatgtcaaccttccgagctgggtcatggtgctgaaagaaaatcattggctcagagagagctaccaggaatcagtgaaagaaaccgtaaaagatattaaacgcctgcgcgatgtcgaccgggttgtcggccacttcagtgaatttgagtttattgaaagcgccggattggccggaatcgaacttggccagggtgtcgcagaaattgatttgtatgcgccggatcatttatatgaccagattttaaaagaagtggtcggcgttgaaatccgcgggaaagaccacctgcttgaattaatgcaggacttcgcccacgcgaaaaaagaatatgatcaggtatcagatgcgctgaaaatggtgaaacagaccggctacggcattgccgccccggccttaaccgatatgagccttgatgaaccggaaatcatcaggcagggatcaaggttcggagtaaggctgaaagcggtcgctccgtccattcatatgatcaaagtggatgtggaaagtgaattcgcaccgatcatcgggacagaaaaacaaagtgaagagcttgtccgctacttaatgcaggactttgaagatgatccgctttctatctggaattccgatattttcggcagatcattgagctctatcgtaagagaaggaatctccgcaaaactgtcactcatgccggaaaatgcgagatacaaactgaaagaaacgctggagagaattattaacgaaggctcaggcggcctgatcgccattattttgtaagctgaaggacctcttcctgaaacggggggtctttttttattctttttagatactggaaatcaatcaaggattaggaggaaaaaagcaaaaaaaggaatatttgttcggtaaaacacgtgaaaaccttgacgagcaagggattgaggctttaaaatgcttgatatggctttttatatgtgttactctacatacagaaaatcttcactttgttggacaaacattcctcaaagtgtctgttttcttatgaaaagccgtttacttgtctgttcttccctgctttgattttttatcagacaggtttagaatcaggctgaactgtgaagaaatgataataaactgctgatttgatacccttttgggaggaggtgaaaggcatgaacaagacagaactaatcaatgcggttgctgaagcaagcgaattgtctaaaaaagacgctacaaaagcagttgattctgtttttgatacgattttagatgcacttaaaaacggtgataaaatccaactgatcggtttcggtaactttgaggtgcgcgagcgttctgcacgtaaaggacgtaacccgcaaacgggtgaagaaatcgaaatccctgcaagcaaggtacctgctttcaaaccaggtaaagctcttaaagacgctgttgcaggaaaataattgtgaatatagatcgtgtatgcatctgatacatacactttgtttcttcacagaaaagccccttgataaaggggcttttcatatttaagcagccccggtcaccgggcaggactttcgttttgcttttggcgcggcaaatgtgctagaatcgaaattaaatgtattcaatggtggaggacacagacaatgaaagaagttaataaagaacagattgaacaggcggttcgccagattttagaggcgattggagaagatccggaccgggaagggcttttagatacgccgaaacgcgtggcaaaaatgtacgcggaagtattctcgggattaaatgaagacccgaaagaacactttaaaaccgttttcggagaagagcatgaggagcttgttcttgtaaaagatatcgcgtttcattccatgtgtgaacatcaccttgttcctttttacggaaaagcgcatattgcctacattccgcgcggcggcaaagtgacgggcctgagtaaattggcgcgggcggtggaagccgtctcaaaacgcccgcagctgcaggagcgcattacttcaacgattgcagaaagcatcgtagagaccttagatccccacggcgtcatggttgtcgtcgaagctgagcatatgtgcatgacgatgaggggcgtaagaaagcctggcgcaaaaacagtgacttccgctgtaagaggtatttttaaagatgacgcagcggcgcgttccgaagtgttagaacatattaaacgtgcggattaataatgatagagggtgcagatatgaattcaaagcattcaagtgattttgtcgtcattaaagcggtcgaggacggcgtgaacgtcatcggtttaacgagaggtacggatacgaaatttcaccattccgaaaaactggacaaaggcgaagtgattatcgctcagtttactgagcatacctctgccatcaaagtgagaggcaacgccctcatccagaccgcttacggagaaatgaacagcgaaaaaaaataagccggctgtttcccgcttttgccaattgcccgcaaacggcgggagaatacagccaatttcttttttttatgctataatgatacctgcgtataataatgacgagtaaatctcatacatattagaataaatgtgaatttggggacaagggtgatatttttgcaagacatctacggaactttaacgaatctaaatacgaaattaaaacaaaagctgtctcatccttatttagcgaaacatatttccgcgcctaaaatcgatgaggataagcttcttctttttcacgctttgtttgaagaggcggacattaagaacaacgacagagaaaattacatagtaactgcgatgcttgtccaaagcgcccttgatacccacgatgaagtgacaacagccagagcgttaaagcgagacgaaaataaaaaccggcagctcaccgtgcttgccggcgactatttcagcggactgtattattcgcttttatctgaaatgaaggatatctatatgattcggacgctcgctacggcaattaaagaaatcaatgagcataaaatccgtctgtacgatcggtctgtcaatgacttgaatcaattgatcgaaagcatggcgattgtggaagcggccctgtttcacagagtgtcagaccactttaatcttccgcgctggaaagagctggcgagtgatttttttgtatataagcggctgatgaacggcaatgctatatttctcgatgtcatcggcaatattgtaaagtcagggaaatcaaaggctgacataatggaagatagcttccgaaaggcaaagcaaagcattgaaacgctgctgccgctcaattcaccaatccaaaacctcatgctgaaccggctcaaagcgatcagccaggacaaaacatatcatcagaaagtggaagaagggtaatcaacatgcaggagtcaaaagaacagcgcgtacacggcgtgtttgaaaaaatctataaaaattatgaccaaatgaactctgttatcagttttcagcagcataaaaaatggcgcgataaaacgatgcagatcatgaatgtaaaagaaggcgcaaaagcgcttgatgtctgctgcggaacggctgactggacgattgccctcgcagaagcagccggaaaaagcggcgaaatcaaaggactggatttcagcaaaaatatgctgagcatcggcgagaaaaaagtgaaagagggcggttacagccaaattgagcttttgcacggaaatgcgatggagcttcccttcgctgatgattcttttgattttgtcaccatcggcttcgggctgcggaacgttcccgactatctgaccgtgctgaaagaaatgcggcgggtcgtcaaaccgggcgggcaggttgtatgtctggaaacatcccagccggaaatgttcggattcagacaggcatattttctatattttaaatacatcatgcctttcttcggaaaaatgtttgcgaagagctataaagaatattcttggcttcaagaatcggcaagagaatttcccggtatgaaagagcttgcgcgtctgtttgaagaagcgggcctgacgaatgtcaaataccattcgtttaccggcggagtggccgctacgcatatcggttggaaatgatgaatatacagatgtttgggtgaatgatatgaaatttaaaatggcctattcttttttaaatgacgatattgatgtgatcgaaagggaacttgagcaaacggtgcggtcagactatcccttgctgagtgaagccgggctccatctgctccaggcgggaggcaagcggatccgccctgttttcgtattgctttccggcatgttcggcgactatgacattaataaaataaaatatgttgcggtgacgctggaaatgattcatatggcgtccctcgtgcatgacgacgtcattgatgacgccgagctgcggaggggaaaaccgaccatcaaagccaagtgggacaaccgtatcgccatgtataccggtgattatatgcttgcgggctcacttgagatgatgacgagattggatgagccgaaagcccaccggatcctgtccaaaaccatcgtagaagtatgcctcggagaaattgaacagatcagagataaatacaatatggaacaaaacctcagaacctatttgcgccgcatcaaacggaaaacggctcttctcattgccgtcagctgccagctcggcgccatcgcttcgggagctgatgagaagattcacaaagcattatattggttcggctattacgtgggcatgtcctaccagattattgacgacattcttgatttcacttcaacggaagaggaactgggaaagccggtcggaggggatctgctgcaaggaaatgtcactctgcccgttttgtacgcgctccgtcagcctgaattgaaaaatcagctgaaattaattaacagtgaaacaacacaggagcagctcgcccccattattgaaaatattaaacgcacagacgcaattgaaaaatcaatggccgtcagtgacaggtacttaaaaaaagcgtttgaaaaactgaatacactgccgagaggacgggcgcgctcatcattggccgccatcgccaaatatatcggcaaacggaaattttaaattccttttacgaacaagatgtgaacattctccgccctggattgattaattgtcagaaagatgttacgatttcggtgtgcaacttgaaagcctatacataatgatggggtggagaatcttatggaaaaaacttttatcatggtaaaaccggacggcgtacagcgccagctgatcggagagattttatccagatttgagcgtaagggcttacaattggcaggagccaagctaatgcaagtttcagaacagatggctgaaaaccattatgctgaacataaagggaagccgtttttcggcgagcttgtggaattcattacatcaggacccgtatttgcaatggtatgggaaggggaaaatgtagtagagatcacaagacagctgatcggaaaaacgaacccgaaagatgcactgccgggcacgatccgcggtgactacggcatgtttgtcggcaaaaatatcattcacggttcagactccttagaaagcgccgagcgggaaattgacattttcttcaaacgggaagagcttgtaccgtatcaaaaattaatggccgactgggtgtactaagccgtcagcctttctttttctcttgttatgaaaaggtttacatattttaagaaagacagaggctgcgctgccctgtcttttcatttctcacaaatcagcctgcgggctgatttttttattgaaatcgtacaaattagaaagaaaacaggctatactaggacaaaagacagcgagattgggagagaagcaatggagccttacgaaatttttatcaccaagtggaaacaaataaccggcgttgatttatctttatacaaagaagcacagatgaaaaggcggctgacgtccctttatgaaaaaaagggattcaaagattttcaggaatttgccgccgctttggagaaagacaagcttttattaaatgaaacattggacaggatgacgatcaatgtttctgaattttaccgaaattataaacggtgggaagttcttgaaacctcaattcttccgttaataaagcataacaaaccgttaaaaatatggagtgcggcctgttcaacgggggaggaaccctatactttggctatgattctcagtcagcaggcgggtttggccggatttgatatattggcgacagatattgatgaaaaggcgcttggcaaagccaagcggggcatctatcaggaacgctcgctgcaagaggtgccggcttccgtgaaaagccgttatttcaccaagcaggctgacaacagttatcaagtaaaacaagagattcaaaaaaacatccggtttaagcggcacaatctgctcgccgacagctatgaacaggattttgatctgatcgtctgccgcaacgtctttatttattttactgaaaaagcaaaagaagagctgtatgtaaaaatggcgggcagcctgaaaaagaacggaattctgtttgtcggaagcacagagcagattttcagcccggaaaaattcggccttgagagcactgatacatttttttatcaaaaaagatagaagacatttaatgaaaacttgtggtatagttttacttaaaagcgttaatgcgatgaagggagaagaaagaaatgagatacttaacagccggagaatcacacggcccgcagctgacgacaattatagaaggtgtgcctgcggggctttatataactgaagaagacattaattttgagcttgccagacgtcaaaaagggcacggccgcggacgccgcatgcagattgaaacggacagggcgaagatcacaagcggcgtgcggcatgcccggacactcggttcacccatcgcgctcgttgtagagaataaagattggactcactggacaaaaatcatgggcgccgcaccgattacagaagaagaagaaagtgaaatgaaacgtcagatttcaagaccgagaccgggacacgcagatttgaacggggctattaagtataatcaccgtgatatgagaaatgtgttagaacgatcttccgcgcgtgagacaacggttcgcgtggctgccggagccgtcgctaaaaagattttagcggagcttggcattaaagtcgccggacacgtcctgcaaattggcagcgtaaaagcagagaaaaccgattacacatccattgaggatctcaaacgggtaacggaagaatcaccggtgagatgctacgatgaagaagcaggccgtcaaatgatggcagccattgatgaagcgaaggcaaacggcgactcgatcggcggaatcgttgaagtgatcgtcgaaggtatgcctgtcggtgtcggaagttatgtccactatgaccgtaagctggacagcaagctcgctgcagccgttctgtcgattaacgcgtttaaaggcgtagagttcggcatcggttttgaagcggccggcaaaaacggcagtgaagttcatgatgaaatcgtatgggatgaagagaaaggctatacacgcgccacaaacaggctcggaggattagaaggcggtatgacgacgggaatgccgattgtcgtccgcggcgtcatgaaaccgatccctactttgtataagccgctgaaaagcgtcgacattgaaactaaagaaccatttacagcgagcattgaacgttcagacagctgcgcggttccggcagcaagtgtagtggctgaagctgcagtggcctgggaaatcgcaaatgccgtcgtagaacaattcgggcttgaccagatcgaccgcattaaagaaaatgttgaaaacatgaaaaaactatcgagggaattctgatgaaagagcttgaggttcggacagcttcctccgcatatcccgtgtatatcggtgaaggcataaggaaacaggccgctgctcttttgtcttcactgaacaggccgctgacaaagatccttctcgtcatcgatgctgaagttgaccggctttacggcgatgagatgttccggcttttaaacgaaacatggcccgtgaaaaaagtaatcgttccaagcggagaagaagcgaagtctctaaaagagtatgaacggattcaaacggaagcgatcgctttccatatggaccgctcctcatgtatgatcgccttcggaggcggcgtgacgggtgatttgaccggcttttgcgcagcgacttttatgcgaggaattgatttcattcaaatgccgacgacactgcttgcccatgacagcgcggtcggcggcaaggtggccgtcaaccataaactcggaaagaacttaatcggcgcgttttatcagccgaaagcggtgatttacgatacggagcttctgaaaaccctgccggaacaagagctgagatcgggcatggctgaagtgatcaaacacgcgtttatcgccgatcatgcttttttagaaaaacttctcacgtttgacacgttgcaaggactgacaagcgctgagctgaatgaaatgatttataaaggaatttcaatcaaatcggccgtcgtgcgtgaggacgaaaaggaagagggcataagagcttttctgaatttcggccatacgctcggccatgccgttgaggcggaatacggctacggccggattactcatggagatgcggtcgccctcggcatgcagtttgccctttacgtgagtgaacaggttgcgggttgcaagatgaacaggaaagaactcacacaatggctgattgggctcggctacccgggaagtatcagacaagatattgaaacgccggttctctccgcccggatgatgaatgataaaaaaacgcgcggaggcatgacacagttcatcgtgttaaaggaattaggggaagcgcgggactgcatgctttcaaaagatgagctcgaaaatttgctgaacaaatggcgaatggaggaaacagcatgatgatacgcggcattcgcggagcaacaacggtggaacaagacaccgaacaagaaattttagaaaaaacacagcagctgcttgaaaaaatcattgaacaaaatggatgcaagccggaagacgttgtacagatcctgttatccgccacgcctgatatccattccgtatttccggcaaaagcggtccgccgcctttccgggtggcagtacgtcccggtgacgtgcatgcaggaaatggatgtcaccggcgctctgcaaaagtgtatccgtgtcctgatgacggttcagacggatacgcctcaggatgaaatcaagcatgtctatttagaaaaagccgttgtgttaaggccggatttatcattgacaaaaaatactgacatgtaatacgataaacaaagcttagaaatacacaagagtgtgtatagagctggtaagtaagatattgaacagttgagtttagaatagggtagcagagaatgagtttagctgagctgagataaacacgtttttattctgcccaaaagaagcctttcttttgggtttatttcttatacgcaagactcctctcactcttcatctcattctccttaccgtaaggaggagaatcatgaatttacaatcggatgtttctttatttttaaaggacagtctgacacaccgcaccattccaatcgcagagacttttacggtcgacacgatcacacccattcagatggttgaaaaactggacagaaacattacgtatcttttagaaagcaaggatgagtcgtcaagctggtcgagatactcttttatcggcctcgatccttttatcacgattaaagagagtcatcacacattcactgccgctgatccaaacgggcatacgctgtttgaagccggagaattaaaagccgtgcttgattggatgaatgaaagcttccgcattaaaacacccgagcttgatatcccgttttcgggaggggccgtcggttatctgagctatgacatgatccctttgattgagcctaccgtgccgagccacgcgaaagaaacagatttcgaaaaatgcatgctgtttgtctgccggaaaatcatcgcgtacgaccacgaaacgaaacaagtgcatttcattcaatatgcggcgcttaacggccgggagacggaggaagaaaagcgggccgtttttaaagaaaattgcgcggagcttcgtaagcttatcggtattttgacagaaccgaaagatatgaaagagccgtttttttctaaagaaacatttgaaacgccaagttttgccgatatgacatctaattatacgaaagaagagtttatggccggcgtcaataaactgaaagaatatataaaagccggagacatttttcaaggggtgctttcgcaaaagtttgacattccggtatccagacattcatttgagctgtacagggtgctccgcatcgtcaatccttcaccttatatgtactatatcaaactgcctgacagagacattgtcggaagttcgcctgaacgtctgatccgcgtggatgacagacacctggaaattcatccgattgccggaacgagaagaaggggcgccggaaaagaagaggacgatcgcctcaaaaaagagctgatgaatgacgaaaaagagaaagctgaacattatatgctcgtcgatcttgcgcgcaatgacatcggcagagttgcggagtacggttccgtagccgttccggaattcacaaaggtcgtttctttttcacatgtgatgcacatcatctctgttgtaaccggccgtttaaaacagggcgtccatccggttgatgcgctgatgtcggcattcccggcaggaacactctcgggcgctccgaaaatccgcgcgatgcagcttttaaatgaattagaaccgacttccagagaaacctacggcggatgtatcgcttatatcggatttgacgggtcaattgattcgtgtatcaccatccgcaccatgagtgtcaaaaacggtacggcgtcggtgcaggcgggcgcgggaatagtcgctgattccgtcccggaagccgaatatgaagagagctgtaacaaagcgggggcgcttttaaaaacgattcaaatcgcagaagacatcttttctggcagggaggagaagacggatgaacaaatttctgcaatcgtgcgttaatggccgcacgctgaaaaccggagaagccgaaaagctgatggagatgatgatgaacggggccatgtcgcagtctgagatcggggggattttatcggtattagcccaccggggtgaaacggcggaggagcttgccggatttgtaaaagtgatgcgggcgcgggcacagacggcgggtggcttggcggatgtcgttgatacgtgcggaacaggcggagacgggatttctacgtttaacatatccacggcagcggcgattacagcttctgccgccggagctaaagttgccaagcacggaaatcgctccgtttcgtctaaaagcggcagcgcggatgtgctggaaaagctgggggtttccattcaagccactccagaaagcgtcaaacgcagcattgaaatgaaacaaatggggtttttgtttgcgccgctgtttcattcgtcaatgaagcacgtcgccgccgcaagaaaagagcttggcttccgaaccgtatttaatctgctgggcccgctcagcaacccgctgcaggtgaagcggcaggtgatcggcgtctattcatttgataaagcgcgcctgatggcaagcgctttggaacaatttgatgtcagacacgtcatgcttgtgtcggcgcgtgacggattagatgaactgtccatcacagcaccgacagatatcattgagctgaaaaacggtgaacgtctggaatattccgtttcacctgaacaattcggttttgcagaaggttcattgaaggatattcaagtgagttcatcggaagaaagcgcgcttctcattcagaatatttttgcaaatagagctccgtcatccgctctgcatattaccgccttaaatgcgggcgcggccatttatacggcaggtcttgcaaacgatctgaaagaaggaacgaaaacagccttagaagccattcaaaacggagatgccaaaaggcagctcgaacgtctgaaacagaaagaggaagaaatgtatgcttgatcaaatcattctgcagaaaaaagaagaaatcaaatccatcgtgctgccggaaacctgtcaaattgaacggagatcctttaaagaagcgctcctgaacccgaaccgttttatcgggctgattgccgaagtgaaaaaagcttcgccgtctaaaggattgattaaagagcattttgttccggaaacgattgcggcggattatgaagcggctaaagccgacgccctttcggttctcacggatacccgtttttttcaggggagaaatcaatttctgacagatgttaaacaaaccgtgtctcttcccgtgctgagaaaagattttattattgattcccttcaggtggaggaatcgttcaggatcggcgccgatgccattttgctgatcggggaagcgctggaacctccaaagcttcatgagctttatctggaagcccgcgggaagggcatggacgttctcgttgaagtccatgatgaaactgtgcttgaacggattttacaagtgtttcagccggacattctcggcataaacaaccgggacttaaaaacgttccgtacttctgtttcgcaaacggaaaaaatagcgcagcttgtgccggacggctgcctgctggtcagcgaaagcggcatcggttctttggctgacctgcaattcgtcaacaagcacggggcgcaggctgtattggtcggagaatccttaatgagagaggattcgcagcaaaaggcgatccgcggactgttcggagagtgacgatatgaaaaagcctgagttaaagtactgcggaatacgatcgaagcgtgattatgaacttgcggcagcttcagaagcggattatctgggatttatttttgccgcaagcaaacggagagtaacgccggatgaggtccggaaatggaaagagcaggtccggacagacaagaaacatgtcggagtatttgtaaatgaaacgatagaaaacatcgcgcaaatcgcatctgatctggcacttgacgtcatccagcttcacggtgatgaatcgcctgaggatgcccttcgcctccgtccgcttgtgcgctcggaaatatggaaagcgctccatcacggggaagggacgctccgtcagatggctcaatttacacctgctgtcgacggctatgtcattgattcttcagtgacaggaatgagaggcgggacgggaatcgcgttttcatgggcccgtgtccccttgtaccgaaagcaggctcaaaatgcaagcaagcgctgttttattgcgggcggtgttaatcctgaaacgattaccggcttactgagaacgcgtccgtgcggtatagatcttgccagcggaattgaaaaaaacggacacaaggatcaaacactgatccggcttttagaagaaaggatgaaccactatgtatccatatccaaatgaaatcggaagatacggcgaattcggcggcaaatttgtccctgaaacattgatgcggccccttgaggaaatcgaaacggctttcacagaattaaaaaatgatcctgtttttcatgccgaatataaaaaactattgtttgattactccggaagaccgactgcattaacgttcgcagacagggtgtcagagtatttgggaggggcgaaaatctatctgaaaagagaagatttaaaccataccggctctcataaaattaacaacgcgttaggccagattctgcttgctaaaaagatgggcaaaacgaaaatcatcgccgaaaccggtgcgggacagcacggtgtggctgccgcgacagccgccgcaaaattcggttttaaatgtacggtttttatgggtgaagaagacgttgcgcgccagtcgctgaacgtattccggatgaaactgctcggcgcggaagtggtgccggtcacaagcggcaacggcacgctgaaagatgcgacgaatgaggcaatcaggtattgggtccagcattgtgaagatcatttctatcttatcggttctgtagtgggtccgcacccatatccgtatatcgttcgcgaatttcagaaaatcatcggcgaggaagcgaaagaacagctccgccgggttgaaggaacgctcccggacaaggttgttgcatgtgtcggcggcggaagcaatgcgatgggcatatttcaggcctttttagacgaagacattgagctgatcggcgccgaggcggccggaaaagggattgatacgccgctgcatgcggcaacgatcgcaaaagggacgctcggggtgattcacggatcaatgacctatttaatacaagatgaatacgggcagattatcgaaccgtattccatttcagcaggccttgattacccggggatcggccctgagcacgcctatctgcacaaaagcggccgtgtaacgtacgaaagcgtgacagacgatgaagcgattgccgcgttacgtctgctttctgaaacagaaggtattcttccggctattgaatctgcccacgccctggcaaaagcgtttgaaatggcaaaggacatggataaagacaaaatcattctcgtcagtttgtcgggaagaggagataaagatgttcatacgctgatgaatgttttggaaaacggggtggagacacatgtttaatctgcgagattctgaaaaattgtttatcccttttatcacagcgggcgatccgcttcctgacatttctgttgaactggcaatatcattacagaatgcaggcgcttctgcccttgaaatcggcgttccttacacagatccgcttgcggacggacccgtcatacaacgggcttcaaaacgggctctggaaaacggaatgaatatcgtaaaagccattgaacttggcggcaaaatgaaaaaaaacggcgttcatattccaattatcctctttacgtattataatcctgtgttacaattagaaaaagaatactttttcgctttactgcgggaaaacgacatagacggcctgcttgtacccgaccttccattagaggaaagcgcccttttgcaaatgacatgcaaaaaggagaacatcgcttatatctcgctggttgcgccgacaagtgaagaccgtttgaaaataattactgaacaggcctgcggctttgtgtattgtgtatcctctttaggagtgacgggcgtacgcagcgaattcgatccgtctgtatactctttcatccgtaaggtgaaagaattcagctctgttccggtggcggtcggttttggcatttcaaaccgcaaacaggttgacgggatgaatgaaatatctgacggtgtcgttgtcggcagcgcgcttgtcaaaaaagttgaagagcttaaaacaaagcttgtgaatcccggcacaagagctgatgcgcttcttgaatttgaagaatacgcgaagacgttcggacgactgtacagtgtaaaatgaggtgactggatttgcagattaaagaacagctgcggcagctgaaaccgtatcagccgggcaaaccaatagaagaagtgaaaatggaatacgggcttgaaaaagtagtaaaactcgcttctaacgaaaatccgttcggctgttcacaggccgcaaaagatgcgctgcatcaggagattgagcagcttgcgctgtatcccgacggttacagtgccgctttgagaacgcggctcagtgagcatctgcaggtcagtgaatcttcgatcattttcggcaacggctctgatgagctagtgcagattatctgccgttctttattaaatgatcaggcaaacacgattaccgccgccccgactttcccgcaatacagacacaatgcggtgattgaaggcgctgaggtgcgcgaggtgccgctccgcagtgacggcgctcatgatttagaccggatgctggaagcaattgacggcgagacgaaagtcatatgggtatgcaaccccaataatccgacggggacatatacttctgagcaagagttaattgcctttttaaacagagttcccgagcatatactcgttgtacttgatgaagcgtactacgagtatgttacggcggacgattaccctgaaagcatcccgcttttaaagcaatatccgaatgtcatgatcctccgcaccttctctaaagcgtacggacttgccgcgctgcgtgtcggatacggcattgcggacgaagcgctgatccgccagattgaaccggcgagagagccgttcaatacgagcagaatcggtcaggcttcggcactggcagcgcttgacgaccacacatttattcaggaatgcgtcgagaaaaataaagcgggccttaagcagtattatgattttgcggaaactcacggattaacttgttatccttcacaaaccaactttgtgctcattgattttaaccgtccggcggatgaactgttccaagccctgttggaaaaaggatatatcgtccgttcaggacaggcgctcggatttccgacagcgttaaggattacggtcggtacgaaagagcagaatgaggaaattctcacaatcttagctgaaatattataagaggtgatcaagcatcacctctttgctctattaaaatagttgaaaaaggaaatgagtgaaatgaaggatactatattgcttgcggggatcgggctgatcggcggatcgatcgcattggccatcaaaaaggagcatccgcataaacggattatcggtgtggatatttcggaagaacagctcactgccgcgctgaagctcggaattattgacgagcgggccggctcattgacggaaggggcgcagcaagcgtctgttgtcattatcgccacgcctgtcgcccaaacgctgaaaatgctcgatatgctggccgcatcagacatcacccatgaactcctgattacggatgtgggcagcacgaaacagaaagtcgtcagctacgccgacaaagtgcttccggctcattatcaatttgtcggcggccatccgatggcggggtctcataaatccggggccgctgccgccaaagaatttttattcgaaaatgcgttttacattttaacacccggaaaatcaacttctaaagagtcagtaacgcatctgaaggagcttttgaaagcggcaaacgcccactttgtggagatgactcccgaggagcatgacggcgtaacgagcgtcatcagccatttccctcatatcgttgctgcaagcctcgtccatcaggctcatcattctgaagaaaattatccgtttttgaagcgtttcgcagccggcggttttcgggacatcaccagaatcgcctcaagcagtccggcgatgtggagagacatacttcttcataacaaagataaactgcttgaccgcttcaaagaatggaaacgggagattgacacgatcgaatcttatgtagaaaatgaagatgcggacagcctgttcggatattttaaaaaagcgaaagattatcgcgacggcctgccgctccgtcaaaaaggagcgatcccgtccttttatgacctttatgtcgatgttcccgatcatccgggggtcatttcggaaattacggcgatactggcagaagaaaaaatcagtatcaccaacatccgcattatcgaaacaagagaagatattaacggaattctcagaatcagtttccagactgatgatgaccggaagcgcgcggaaacctgcattcaatcccgcgccaaatatgacacattttacgctgactgaggtggaaaacattgaaaagagaaaaagtgacgtctttaaacggtgaaattcatattccgggggataaatccatctcccaccgttctgttatgttcggagcgcttgcggaaggaacgacaacggtaaaaaactttttgcccggagccgattgtctgagcaccattgcctgcttcagaaaaatgggtgtctccattgaacaaaacggaagtgatgtaacgatatacggaaagggcattgacgcactttgtgagcctgacagccttcttgatgtcggaaattccggcacgaccatccgcctgatgctcggcattttagccggacgcccatttcacagtacggtagcgggtgacgaaagtattgcaaagcgcccgatgaagagggtgacggagcctttaaaacagatgggagccgcgattgacggaagagcggacggagggtttacgcctttatccgtaagaggcggacaattgaaaggcatagattacgtctcccctgttgcaagcgcgcagatcaaatctgccgtgctgcttgccggattgcaggctgaagggacgacgaccgtcactgagcctcataaatcaagagaccatacggaacggatgctgaacgcttttggcgccgagcttgcggaaacggagacgagcgcttccgtaacgggcggtcagaagcttcggggagccgatattttcgtgcccggcgatatttcttcagcggcctttttcctcgcggcaggcgctgtcgttcccggaagccggattgtgctgaaaaacgtcggcctgaacccgacacgcacgggaatgattgatgtcttaaagcaaatgggggcttcacttgaagtgattccttcagaagcggacagtgcggagccttacggagacctggttattgaaacctcagctctgaaagcggcagaaatcggcggagaaatcattccccgtttaattgacgagatcccgattatcgcccttttggcaacgcaggctgaaggcacaactgtcattaaagacgctgcggagctgaaggtgaaggaaacgaaccggatcgacaccgtcgtatcagagctccggaaaatcggcgcagacattgaaccgactgaagacggcatgaaaatacacggcaaaaaaacgcttgcgggcggagccgatgtgtcaagccacggcgaccaccgcatcggcatgatgctcggtatcgcttcatgcctgacagaagagccgatcgacatccgtgatacagaggcgatccatgtctcatatccgacattctttgagcatttagatcaattagccaaaaaagcctgaagacgattcttcgggcttttttcttcatgtgtcataaaatcttgggctttgacatagcttgtcttaaacagaaaactaaaagaaagggggaatgcgttttcgttacagaaacagccggaacaaattgcgctgtttgcgtataaagatgccgtccccttttttgccgttttcctcttaaccattttctgataaactataatgccgggtgaagcatcttatttgcgggcaggccctgtctgaattatgataagaataacccgaataaaaacccttttcatttggttgatgaggtataggaaaagaaaggaccggtctgatttgaatacattgattcaagaagccataaaattagttgaagcaggtgaaaccgaaaagggactcaaagcgctttcaaaagctgaaacagagcttcatgacgaagacaaagccattgcagcccagctctactatgaatggggaaacgccgaaaaagcgttagcgctgatcagtgatctgcatgacctctatccgggtgagtctgagctgacgaatttttacgccgaattgttaatagatattgatgaagaagaaaaagctcttgaggtgctggagacgatttctccggaagacccgtcttacgcggaaagcctccttttaatggctgatctgtatcagatgcagggcttatttgaagtaagtgagcaaaagctgttacaggcgaaagcgatgttacaagatgaacctgttattgatttcgctctgggggaattatacttcactcagggatcatatgcaaaagccgttccttactatgaagagacggcaaaagaacggcacgaaatcggcggcgtaaacgttcatcagaggctggctgagtcattgagcgcggcgggtgaatttgaggaagcgatttcatggtatgaaaaagcggcggcagaacatacagaaccgaatacgattttcgggtacgggttcacagcctatcaggcgggaatggtcaaaacagccatcaagcagctgtctgatttaaaagggcttgatccttcctattcatcgctttatatgccgcttgcaaaaagctacgaggcagaaggcatgtatgaagatgcattaaaaaccgctaaagaaggtattacttacgatgaatacaataaagagctttttctctatgcggcgaaaatggcgttaaagctcggcagcgaagaggaaggcaaaaagcttcttcaggaagcgctggcgctcgatccgggttacgtggaagcgctccatacgcttttagccgtctatcataaagaagaaagctttgaagagattattgatctgattcaggaagtccgcggctacggagaagaagatccgaaatacaattggtatttggcgggggcctatacaggcctggagcaatacgctgaagcgaaaaaaagcttcgaagctgcgtatctccattatcaggatgatcgggatttcttatatgaatacgctcacttcttattggaagagggtctccagaaagaagcgctgccgcttttaaaacaagtgctttcaatggatggaacaaacgaagagcttgaagaaacaatcttacggatagaggatgaatttttaagataagcaggattttggaccatgcttgctgaatgtataagtgatgtcagattatacgatcgatagaggagggaattacatgcagacccctgtttctgtcaatgaaaaaaaggattttatccgttggtttttaaatcattatcagcttaaacgccgggagtgcgtctggattttaaattatttaatgagtcatgattcattaatggaaaaagtccattttgtagaacaagccgaattttgcccgagaggcattatcatgtctactcattgcgttgatgaggtgccgtttaggttttacaaagaaaatgtcatgactacggacgcggaaaaatcttttcacgacatccggttaaataaacagcaggatttatttatccagctgaatttccgttcggcctacagctcaccggaatatgccgctgttcttgaatcaaatccgcatctgccgaaagacctgtttgaaaataaacaggatcaggggatggctgaaaaaatattagaacatgccatttccactttccagcgggaaaagctgcttaaagatatcgacgaggcgctggaccgccacgacaaagaaacatttgaaaagctttcccgccaattgaatcagctcacataaatgacagccttgcagaatatgcaaggcttgttgcgtaaagaggaggaacgagacatgagatggagggccgctgatgccgatgcctatttacaatctgcggattacattgataccgctgtcattccgttaatttccataacgtcttcaggaggcttaaaagaggccgttgaacagggggaaagcacccaattgctttctgaagagcttgagcgccaattgaagggacgggtatatttattcccctcttatacatatgttgatatagaccaatcacaaatcgccctgcttcaaaaactcaaagaagaggtgatgaccaacttcaggcacgccttgttcctgacggcagacgaaaaatggaaggattctgaaatagggtctgatgtcatatacatacctgccgttccgtttgaacatatgaaagactctttaaagagaaaaattgcggatgacaagtgcggagaaattttgaacgttttgttacagaagtggaacaattcttaaaaactccaggcatcctgcaaaacacccgttttgcctctgttgaccttgctgaaagattcatatattatgagggtgtcaaatctcagaattattttctattttagttaatttttggtcaatctttagggggggaagagatgggcggaaaacaagatatatcaagaagacaatttttaaactatgcgctcaccggcgtggggggatttatggccgccagtgcgcttatgcctatggtccgttttgcgctggatccggtattaaaaccgacgggagatcaaaaaatggtgcaggttgtcagtgtggatgagctgacgaaggagccgaagcggtttgactttaaaattcatcaagtcgacgcctggtacgaatcggaagaatccaggtcagcctgggtttacaagcatggggatgaaattatagcgctttctccgatctgcaagcatttgggctgcaccgtaaactggaacaatgatcctaaaaatccgaacaaattcttttgtccctgccattacgggctgtatgaaaaagacggcacgaacgttccgggcacgccgccgctcgcgcctcttgaccgttatgagcaaaaagtaaaggacggctttttgtatcttggaaaagcaaagcctaggggggaagggtgacatgctgaataaaatttatgactgggtggatgaacgtctcgatattacgccgatgtggcgggatatcgccgaccatgaagtgccggaacatgtaaatcccgctcaccatttctcggcttttgtctattgtttcggcggtttgacgttttttgtaaccgttatccaagtgctctccgggatgtttttaacgatgtattatgtgccggatataaaaaacgcgtgggaatctgtgtattatttgcagaatgaagtcgctttcgggcagattgtaaggggtatgcaccattggggcgcaagtttagtcatcgtgatgatgtttttacatacgctgcgggttttctttcagggagcttataaaaagcctcgggaattgaactggatcgtcggtgttctgatcttttttgtgatgctcggtctcggatttacagggtatttgcttccgtgggatatgaaggcgctgtttgcgacaaaggtaggtcttcagattgccgaggcgacgccattgatcggagcgcaggtgaaaactcttcttgccggccaccacgatattgtcggcgctcaaacgctgacgagattttttgcgattcacgtattttttctccctgccgctttgtttgcgctcatgggcgcccactttgttatgatccgcaagcagggaatttcaggaccgctttaatacaaatctgatataaaagggaggggatgacatgcaccgggggaaaggaatgaagtttgtaggagattcaaggataccggctgaaaaaaaaccgaatataccgaaagactattcagagtatcctggaaagacagaggcgttttggccgaactttctgctgaaagaatggatggtcggggccgttttcctcgtcgggtttctcgttttaacgattgtgcacgagccgcctttggaacgggtggcggatcctacggatacagggtatattccgctgccggattggtattttctatttttataccagcttttaaaatatgaatatgccgcagggagctacaccgttatcggagcgatgattataccggggcttgccttcgggtcgctgcttttggctccgtttctcgacagggggtctgaaagaaggccgtggaagcgtccggttgctgtcgggatgatgcttttggcgctttgcgctacggtctttttaacgtggcagtcagtcgcgacacatgactgggcaaaggcggaggagcaagggaaaattaaaaaagaagccgccattgatactgaatcagacggttataaggtatttaaagaacaaggctgtatttcctgtcacggggataatcttcaagggggaggcgccggtccgtccctggtcgataacgggctgagcccggaagaaattaaaaaaatcgccgtcaaagggaaagggcagatgccagccggtatttttaaagggaatgacaaacagcttgatcagctggcgaagttcatttctgaaacgacagcgaaataacgtattgtgaagtagacaacagcaggatatactttatgaaaagagctgaccggatgtcagctttttttgcatgatacatactttttacggactgagagttgatggtatgaggtggatttcttatcttttagggttgcgcggcatgcttctgcttgttcttgccgttaattttatcggtacggtgtacggctattattggtatgtgccgcagcttgcggacacgccgttccgatttctgatatttgtgcctgacagcccgacggcgacgtttttcttcctgtttgtgcttctggcatttctcatgggaagaaacgcgccgctgtttgaagcgctggctcttgtaacccttgtaaaatacgggctgtgggcggtcggaatgaatgtctttgtgctggtcaaaatggggcagatgccttgggaagggtatatgctgattgcttcacattttgccatggccgttcaaggcgttttatacagcccgtattttcggttccggttatggcatcttgccgttgctgctgtttggacgcttcataatgacgtcattgattatcttttcggcatgatgccccgctactcaatgctcaatgactatatgcaagagatcggctatgctacattctggctgagcatattttcactcggccttgcatactatttggtgatttctaaaagacggataaagcttgacttacactgatagaatcttggtctaaccttgtcccgctcctcatattctgtaaagagaaggagtgggagggacctctatgaaacgaaagctgacgatctgtcttttacttgctcttatgtgtttcatcacaactgccaaagctgaagatgagggcggtctcaaggaactgaacgacctttcggataccgttttccaaatgacgcggcattcgcagtatgatgaggctctgcaagtgcttggctactttaagaaaaaaatgacacacgtaaactcactgagcggcgccgaagtcaggcaggtgactctgggcttcaatgatttagtgcgcgtcctgaaacaggcagacgcctcagataccgaaaaaatccgggcagccgcccagttcaggttggtaatggatgcgatggaagaccactccgatccgctgtggggttcgcttgaaagaccgattatggcgacattcagcgccttaaaagaagatgtcagcggaaacggaagtggaaatttcaatgaaaagtggaatgaatttatatcattatatgatttaatttatcccagcctgacaatggatgtgtcggccggccagcttgatacggtggcgaaacatatcgaggtgattgagcaggaagggtttcagcagatgacaaaaggaacaaagcttgagcgtctgacactcctgcagcaggatttaaagcgggtttttgacaaggtggagcgggatgacgctgacccttcgctgctctgggtcattctgacaacaggcggtatcattattactgcgctgacatatgtcggctaccgaaaatacagagcggaaaaaaagaaagagaaaaagcgtgagtatcctaagtctaaataaacacaaattgctgtaaaggagctaagtcagtgaaaaaactcatccagcaattggcttcaaaacacctcccgcagccgatcagaggcagaaaaggggcgactgacgaaggaccgcgaaacctcgcgcgtgacttccagaatcctgacatgctcgttccgccttcaacggatgcaggaacggttcaaaacttgaaattctcattttctgatacgcatatgaggcttgaagacggcggatggtccagagaggtgacggtcagggaactgccggtatccaaaaacatcgcggcggtgaacatgaggctgaaaccgggagctgtgcgggagcttcattggcataaagaagccgaatggggatatgtgattaacggaggagtacgtttaactgcggtcgatcaaaatgggcggaattttattgataacgtaagtgaaggggacctgtggtattttccttccggcattcctcattccattcaaggattagagcagggaagtgagtttttgctcgtctttgatgacggctctttttcagaaaacagcaccttttcagtaacggactggtttgcccacaccccgcgcagcgtgctggaggcgaacttcggtgttccgggctatgagctggcttacattcacaagaaagagcgttatatgttccagttggaaccgccgcccccaattgagcgggcagcagtctcttccccggaaggccccgttttagagccgttcagctacaagctttcccggcaggagcctcttgttaccagcgggggaagagtaaagattgtcgattcaaaaacgtttaaggtgtcaaaaacgattgctgcagctcttgtggaggtcgaacccggaggcatgagagaattgcattggcacccgaatacggacgagtggcagtattacctttcaggagaagcgaaaatgacggtgtttgcggcggagggaagagcgcggacatttaactatcaagcgggtgacgtaggatatgttcctgttgcaatgggacattatgttcagaataccggtgacaccgtgcttcgctttctggaaatcttcaaaagcgaccgtttcgaagacgtctccttaaaccaatggctggcactgacgccgcagcgcttcgtcgagcagacgctcaatgtcagtccggcattcgcccgccgattgaaaaagaaaaaatcaccggttgtcaaatggaaacacgaacagtaaaggcggcaaaagccgcctttttattatcgtctgatcggatttttattttcatcaagcgtaaatccttcgccgagcacatcatggacgtcgcttactgcaacaaaggcgtgcgggtcaacggaagtgatgacgcttttcaaaagcacaatttcgtttttcggaacgacgcagtaaagaacgtccctgtcttcttttgtatatgatccctgtccttttaaaacggtgacgccgcgctccatctcttcaatgattttttgctggatcaaatcgtttttcgaagaaataatcgttgccccttttgcggcatagccgccttcctgtataaaatcaatcaatctcgcagcgacaaaaacggctacaagcgtgtacatcgcttccttgtaagaaagatacgtaaacaaagaaagcagaatgacacaggcgtcaaaggcaaacatcgtccggcccatcgggattccgaaaaatttgttgatcagccgagcgatgatatcgaccccgcccgtcgtgccgccgtatttaaaaataatgccgagacccgcgccgataaaaacaccggcgaacaaggcggccagcgctaaatcatgcgacagcggcatatgaatttcgtagcgctgaaaaacactcagaaaaacggaaagagagacggtgccgatcagggtatagacaaacatcgtccggccgagcatacgccagccgatgaaaaagataggaatgtttaataccaggttggaaatagaagggctgatgtggaataacgcatataaaagcagcgtaatgccggtaaatccgccttccgccaaattgttctgcatattaaagtgaaccagtccgaatgaaaaaacagcggcgccgattaaaataaagcaaatgtttttgattctgatttctccaagcattgcatcaaaccccttttccttccataagattgcgtaaatattatagtggatacaaaagaaaacagcaaactgccgtttttaacatttgtcaaatgtacttgaattagctaacatggaagagatgacaggaggtattcgcacagtgagtgacaaaacgatgaaagacttacaagctgaggtcgatgaatatatcggccaattcaaagaaggctatttcagcccgcttgccatgatggcccgtctcacggaagaactgggcgaacttgcaagggaagtcaaccattattatggggaaaagccgaagaaaacgacggaaaatgagaaaagcatggaagaggaaatgggcgatgtgctgttcgttctgatctgcctcgccaactcccttgatatttcattggaggaagctcataaccgcgtcatgcataaatttaatacacgtgataaagaccgctggactagaaaagaagaaggaaagtaggagaaaccatgtcaaatgaaaccattaaagtcgtcattgccggaccgagaggcagaatgggccaggaggccgtaaaacttgccgtccgcacgcctcattttgagcttgtcggcgccattgaccatacatacgatcagcaaacattacgggaagtgatgtcagctgattcagacgctcttatttatacggatatccgcgcatgtttccaagaaacaaaaccggatgtgctgatcgatttgacaacgcctgaaatcggcaaaaaacatacgaaagccgctcttgaacacggcgtccgccccgttgtgggaacgaccggattttctgaagcggatttagaggagcttcaagccttgactgaagaaaaaggaatcggcgccatcatcgctccgaattttgcattgggcgcggtgctgatgatgaagttctcacaaatggccgccaactattttgaagatgtagaaatcattgagcttcatcatgatcaaaagctggatgccccgagcggaacggcgctgaaaacagcggaaatgatttcaagcgtccgtacagaaaagcagcagggccatcctgatgaaaaagaaattctgccgggcgcccgcggtgctgaattaaacggcatccgccttcacagcgtgcgtctgccgggccttatcgcccaccaggaagtcatgttcggcatggacggccagacgctgaaactgcgccatgattcctataaccgggcttcctttatgtcaggagtgaagctgtcagtggagcaagtgatgaaaatcgaccagcttgtatacggactcgaaaatattatcgactgaatcggcaagggggagaacatcaaatgaaaattgctttgattgctcacgataaaaaaaagcaggatatggtccagtttacgaccgcatataaagatatattgagccatcatgagttatacgcgacgggtacgacaggcttaaaaatccaggaagcgaccggattgtccgttgaatgttttcaatccggcccgctcggcggagatcagcaaatcggcgcattgattgcggcaaacgccctggatctcgtcatttttctgcgcgatccgttaactgcgcagcctcacgaaccggatgtctccgcgctgatccggctgtgtgacgtatacgcgatcccgctcgccacaaatatgggaacagcggaaatccttgtccggacgctggacggcggggcatttgatttccgcaatcttgtgcgcggaggagagccgaatgtctgaacacgttgatattctggcgttcggcgcccatagtgatgatgtcgagatcggtatgggcggcacgatcgcaaaatttacggctcaaggaaaaaccgcggtgatatgcgatttgaccgaggccgaactatcatctaacggaacggtagggataagaaaagaagaagcggcagaggcggcacgaattctcggcgtaaaagagagaatccagcttacgcttcccgaccgcgggcttttgaaaagtgaggacggcatccgccggattgtcagtgtcatcagagcctgccggccgaaaaccgttttcatgccttatccgaaagaccgccatcctgaccacggcaatgcggcggctttggtcgaagaagcggtgttctcggcgggaattcataaatacagagatcatcaggaactgccggctcataaggctcagcgcgtatactattatatgatcaacgggtttcaccgtccggactttgtaatcgacataacggaaaccatcgatctgaaaaaagaaagcctgcacgcttatcaaagccagtttattcctacggcgcagtcagtgaacacaccgctgaccaacggttatatcgaaatggtggaagcgcgggaaagactgtatggcaaagaagccgggacggggtatgctgaaggcttcttttcaaaacagcttcccgttttgaatgatgatgtttttgggggcggacaatgagaccattaaaaatagggattacatgctacccgagtgtcggaggctcgggtattattgcgacggaactcggcaagctgcttgcggaaaaagggcaccaggttcatttcatcacatcaagcatcccgttcagattaaatacatatcatccgaatattcattttcatgaggtggaagtcaatcaatacgcggtatttaaacatccgccttatgaccttacactggcgagcaaaatcgccgaggtggccgcgagggaaaatcttgatatcattcacgcgcattatgcgctgccgcatgcggtatgcgcttatctagccaaacagatgctcaagcgtgacatcgggatcgtgacgacgcttcacggtacagacatcaccgttttaggatatgatccgtcattaaaagatttaatccgttttgccatcgaagcgtccgacagagtgacggcggtatcaaccgcgcttgccggagaaacatatgacttaatcaagccggataaaaaaattgagaccatctacaactttattgatgaacgtgtttatcttaagaaaaatacagagagtataaaagagaaacatggtattttgccggatgaaaaggtcgtcatccatgtttcgaacttcagaaaagtaaaacgtgttaaagatgtcatccgcgttttccgtaatatcgcagccaacacaaaggcgaagctcctgcttgtcggtgacgggccggaaaagtgcgtcgcttggcagcttgtcgaaaaatacggactgcaggatcaagtgctgctcctcggaaatcaggacagggtggaagagctgtattccatcagcgatcttaagcttcttctgtctgaaaaagaaagtttcggactcgtcctccttgaggcgatggcctgcggcgtgccgtgcatcggaacaaatatcggcggcatcccggaagtgattaaagatcaagtaagcggttttctggtggaagtcggcgatattcaggcggcatctgaaaaagcgcttgccgttttagaagataaacagctcagcaaacgattgactgatcatgcgctgaaaatggtggagacctccttttcttcgcaaagaatcgtcagtcagtatgaacggatttatgacgaattggcaggaccggagtgatcttatggaacaggaatttgtcaaagccctccccatccttcatcatctgatgaaggcgggccatcaggcgtactttgtcgggggagccgtcagagacagctatatgaaacgaaaaataggtgatgtggacatcgcaaccagcgcttcgccgaatgaggtggagcgcctctttaagcggactgtcgatgtaggaaaagagcacggcaccgtcatcgtcctgtgggaagatgaaacctatgaagtcaccacttttcgtgccgaatcagaatataaggactatcggcgcccggaagctgtgcggttcattacttctttatcagaagacttaaagcggagagacttaacgattaatgcgatggcgatgtctgccgaaggagagctgcttgattatttcggaggcgcacatgatatcggacaaaagctgatccgtacggtgggtaaccctgaagaccgttttcgggaagacgctctgcggatgatgagagccgtccgctttatgagtcagctcggctttctgttagaaaaagaaacaagagaggccgtcataaaagacagggagcttttggcacatgtatcagtagaacgaaagaccgtcgagtttgaaaagctgatgcagggcgctttctcacaagaagcgattcaaacgatggtgcagacaggtctgatacaagagctgcccggcctttccggttatgagcagcaaatgcttgaagcaagcggctttccgttttcttctttagatgcacgcgaagaacgctgggcagcgctgttattgtttctcggtctttgtccgaaaagtgccgaggcgtttttaaaacaatggaaactgccgggaaaggtcataaaaaaagcggtgcagatcataagcgtttatccggcgcagctggaagcagaagcgatgtaccgagcgggagaggcgctgttttcagccgttaaaatcgggatgctgaaacagcataagacgattgatgaacaaaagctgaaagaggttcagagcctgtatgagcagctgccgatcaaaagccttcgagacctcgacatttcaggcgctgatctgatggagctcagaaaccgccgcgcgggtaaatgggtggccgaagaacttcgccggattgaagaagcggtattggcagggaagcttcctaaccgaaaacatgacataaaggagtggctcgcatcatgggatcaacattaagaacccgattaattgatttattttctgaggcgggtgacggctttatctccgggcagaaaataagtgacgcgctcggctgctcgagaaccgccgtttggaaacatatagaggagctccgcaaagagggctatgaggttgaggcggtcagacgaaaagggtacaggctcattaaaaaaccggggaaactcagtgaatccgaaatccgtttcgggctgaaaacagaggttttgggcaaacagcttcattaccgggacgtcctgccgtccacccaaaaaaccgctcatgaacttgccaatgacggcgcgccggaagggaccctcgtagtcgccgataaacaaacggcaggcagaggaagaatggccagagtatggcattcacaggagggaaacgggatttggatgagcctcattctgagacccgacgttcctttgcaaaaaacgccgcagctcaccctgttatccgccgttgcggtcgtacaggccatcgaggcttttacaggcgtacaggccgccattaaatggccgaatgatttaatgattcacggcaaaaaagccgtcgggattttaactgagctgcaggcggaagaggaccgtgtccgttcggttattctcgggatcggcatcaacgtgaaccagcaggaaaccgattttcccggcgagcttcaggacattgcgacgagcctgagcatggaagccggtgaaaaaattgacagagcgggtctgatacaagagattctgctgacttttgaaaaacgctatcaggattacttgaaccacggctttacaccgatcaagctgctatgggaaagctatgcggtcggactggggaacgagctcagagcgagaacgctgcaaggaacgttttacgggaaatcgctcggcattgatgatgagggagttcttcttttggaaacgagagacggtataaagaagatctattctgccgatattgagctcaattaatcttagttggtacaagcctcgtgaatttggtatacttcctatgggcagtatcataatgaactgcacctgatcagcagaacagagattacgaaaagtctgccttgatccaaaaaaggactgggacagagggatgacattcgccgaacgttaaacaagtgggaatccttcttattttacagaaggcttttttgcttgcgaagaattggcggctcatctcctcaccgtttagaggaggagaaacagaatgaaaacaaaactggatttcatgaaaatgaaggaaaacggagagccgatcgtgatgctgaccgcttacgattatccgcaggcaaagcttgcggaacaggcgggagtcgacatgattttagtcggggattcgctcggaatggtcgtgctcggactcgattcaaccgtcggcgtaacggtcagggacatgattcaccatacaaaagcggtaaaacgcggtgcgaaaaatacgtttatcgtaactgacatgccgtttatgtcttaccacctttcaaaagaggatacattgaaaaacgccgcggccattattcaggaaagcggcgcggacgcgttaaagctggaaggcggagacggcgttttcgaatccatccgcgcgctgactctcggcggaattcccgtcgtcagccatttaggcctcacaccgcagtctgtcggcgtattaggcggatataaagtgcagggaaaagatgagcaaagcgcgaaaaagctcattgaagacagtatcaaatgcgagcaggcgggagcgatgatgctcgtgcttgaatgtgtgcctgctgaactgactgctaaaataatagaagaagtatccattcccgtcatcggaatcggagccggttcaaaagcggacggccaagtccttgtctatcatgacgtcgtcggccacggcgtggacagaacaccgaagttcgtgaagcaatacgccaaaatcgacggcacgattgagtcggccctcagcgattatgtccgtgatgtgaaagaacgggttttcccggaagaaaagcattcctttcagataaaccaaactgtgctgcaaggcttatacggaggaaagtaagcgatgaaacaactgacagaaactcaacagctgaaagaattaattgcacaataccgctcagaaggccggacgatcggattcgtcccgacaatgggttttcttcatgaaggacacctgaccctggttgaaaaagcaaacaaagaaaacgatattgtcgtgatgagcatctttgtcaatccgactcaattcggaccgggcgaggattacgaagcatatccgcgagatttaaagcgcgatgcccggcttgcagaacaggcgggagcagatgttttgtttacgccgtctccgagtgacatgtataagggcgagcaaaatgttgccgtgcaagtgaaaaggagaactgacgtgttgtgcggcgtctcccgcgtcggccattttgacggagtggccactgtgctgacgaagtttttcaatctcgttaaaccgacccgcgcctacttcggcctgaaagatgcccagcaggcagcggttgtggacggattgattgaggatttctttatggatatcgaattggttgcagtggacacggtcagagaagaagacggacttgccaaaagctctcgcaacgtctatctgactgagcaggaacgcaaagaagcgccgatgatctataaagcattgcagcaaggtgccgaactggtcagagacggtgaaagaaatccggaaaccgttataaaaaccgtcaccggtatcatcgaaaacacaagcggcgtcattgattatgccgaactgtacgcttatccggagctgactccgcttaaaacattaaacggcaaggtcattctggcctgcgccgtccaattttctaaagccagactgattgataatatcattattgatattgatgaatgggagagatcataatatgtaccgcactatgatggccggaaaactgcaccgcgctaccgtgacggaagccaatttaaactatgtcggcagcatcacgattgatgaagatcttttagatgccgtcggaatgctcgctaatgaaaaagttcagattgtgaataataacaacggagcgagacttgaaacgtatattattcccggtaagcggggagcggcgtcatctgtttaaacggagctgccgcccgtctcgtccaagaaggagataaagtcattattatttcttatcaaatgatgtctgatcaggaagcaaaaagccatcagccgaaggtggccgttctggatgatcagaataaaatcgagcagatgctgggccaggagccggcacacacgattttgtaaaagagccccttcatgggggttttcttttaagatttaggggcaaaagctgtttttccgctccatttctcaacaaaacgtgttacacttttctcgtatgcaagaattgaggtgtccattttaatgaacaaacaacggttcgttgtcatagatgtcgaaacaacaggaaattcgccgaaaaagggcgataaaatcattcaaatcgcagcggttgtcattgaaaatggacaaataactgagcggttttcaaaatatatcaatccgaatcaggccatcccgccgtttattgaacagctgaccggaatttcgtccggaatggttgaaaatgaactgccgtttgaagcggtcgcagaggagatttttcatctgcttgacggcgcgtattttgttgcccacaatattcatttcgacctcggatttgtccggcatgaactgagcgaagcgggctatgagctgccggattgtgaagtgcttgatacggttgagctttcgcgtattgttttcccggggtttgaaggatataagctcggtgagttgtgcgcagagctgaatattgttcatgaccgccctcaccgcgcagacagcgatgcggaggttacgggcctggtctttttagacattttacataaactgaaacatctgcctttaccgacgttaaagcagcttagaaggctttcacagcattttatcagcgatttgacgctgcttttggattcttttattcatgaaagcaggccggcggaagaaaagagctgcattccatacgcctctttttcaattaaagagcccgatcacattccggtttcccgtccggtgaatgcggccattgaccttgaaaagtggaacgaagaaaaagaacagatcttgtccggcatcatccccgctatgaaaagcggaaaggacagcttacgatgatggatgaagtgcttggcgccttccgcaatcgggagcatgcgctgattgaagcggcgcccggcatcggaaaaacgatcggttatctcgttccggctgttttatttgccaaagcggaacaaactcccgtcattatcagcacgtactctactcttttgcagcagcagatcatgtctaaagatcttccgcttttggagcgtatgtttccttggccggtcaaagctgctattttaaaagggaaatcacattatctgtgcctgccgaagtttgaacatattctgcatgaggaagatgacaactatgatgcggttttgacgaaagcgcagcttctcgtctggctgacggagactgaaacgggcgacgccgctgagctgaatcttccatcaggcggcagattgctgtgggagcgcatggcttacgatgagaattcttttatgaaaaaagggaaggactcggctgccgggttttatgaacgggctaaagaaaaagcgcaggccgcagatctgattatcacaaaccatgctttgctgttttcagatcaaagcagtgaaacgaaaaaactgcctgcaagcggaacggtcatcattgatgaagcgcatcatttcgaacgcgccgccagcgagcacctggggaagagagcttcatacatcggactgcacacaaagctcagccgaatcgggaccttaaaggaacacggactgttaaagcggatgagaaaactgttttatacgtatgaactgccggcggaaagtttttttgacgccgatgagtggatgaagcatattcaatcggaaagcgacgcatttttcagttcagtgcattcttttgtcaaacgaagaaaacctaaagacgatctgaaccgtctcgtctatagtctcaatcataaaagccaggataaagggtttcacatgataacggacggagcggagcggctttgtgcgatgcttgatcagctgcttgacatgttttccgtacaggagaaactgttacatcaaaagcttgatcagatgaaaagcggagcggcttttttagcgggcgaatatgtaaagtgtatcagggggctgaaagaatatcgcgatacgttcagcaggctgctgtttgaaaatgatgagaaagaagccgtttgggttgaaattgatgcgaagggcgcaaaaaatgccgtcagcatctatgcgcagcctttggagcccggtgaaatgctggcagaccagtttttcgcccgcaaaaaaagcgttgtgctcacatcagcgaccttaatggtggagcagtcttttcaatttatgattgaaaggctcggacttgcggatttttatccgcgcaccaaaagcatcccgtctcctttttcttacgatgatcagatgaacgtcatcattccgaaagagatgaaatccgttaaatatgacggggagcgggaagtcattgagcatattgccaagtatgcagaaatcatgtcaaagggaaaacagccgaagatccttgtcctgtttacgtctcatgatatgctgaaaaaagtgtatcaggaactgaaactcagtatggagatctcaggcattcagcttctcgcccaaggtatttcaggcgggagtcccggtaaattaatgaaaacctttaaaacggcaagccggtcgattttgctcggaacgaatcatttctgggaaggcgttgattttccgggggatgaattgtcaaccgtcatgatcgcaagacttcctttcagggcgcctgataatccgcttcacgccgcaaaatgcgaatttgccaagaagcaggggaaaaatccgtttcagacgatttccctgcctgaggccgtgttaacgttcagacaggggatcgggcgcctgctccgtacggcgggagacaagggaacgatcgttcttttagatcagcgtgtaaagacggcgggatacggacggctgtttcttgaagcgctcccgacttcatcccttttggagctgacggatgccgaactcggggcttatgtcagccaaacggaataaaagccgcataaacgcggctttcgtggtgtgggatgaggaattgtttttatagtaaaagcgggttcatgccgccttgtgattttattatgccgcgggcgcatcccgttatgactaacaaaatttgttcgaccgatggagggtataaaaatggaaagcaaaattgaaattctgtcaacgattaatgtggagcattcagatgatttatataaaatcgtcgatacattaaaccggactttgaaacgggacaacctgatgttcggccttgcgctcgacgaagaaaatcaaaatgaagcggtcttcaccatttatcgcacataggtgaaaaagatgagaaaaaaagcattaatatttacagccgtatttggtattatttttttagcagttcttttattttcggccagcatttttaaatctgcaatggctcaaaaagaagaaggccacgaaacagctgccgcagccgctaaagaaaaaacgaatctgacagacgctgagaaagtggagacctttgtcggcaaacagaaatattatgttgttaccggaacggataaacatggaaaagatatgtatgtatgggttccggccgacaaaaaagcaaaaattctctcaaaaaaagccagtgacggcatttcaagcggcaaggctgccaagatcgttcgggacgaagggcttgtttccaagctgaatggcgttcacccggcgagagaaaacaatgttccgttatgggaagtgacctatatcaacaaaagcgggcagtatagctttagctatgtggactttacaagcggcaagattctcaaaaacatcacaccgtgagacgtattaggggagttcaagttgaaattggcaaaaagagtatccgcattaacaccgtctgcaacacttgcaattaccgcaaaagcgaaagagctgaaagcggaaggccatgatgtcatcggcctcggagcaggagaaccggattttaatacgcctcagcacattatagatgccgcggtgcgttccatgaatgaaggctatacgaaatatacgccttcaggcggtctgccggccttgaaagacagtatcgcaaaaaaattcaaaaacgatcaggggattgaatataagccgtcagaaatcattgtctgcactggagcgaaacacgctctgtatacattatttcaggtcattctcgatgaagggacgaagtgattataccgactccttactgggtcagctatcctgagcaggtgaaactggcaggggggcgtcccgtctatgcagaagggctggaatccaatcagtttaaaatttcaccggagcagctgaagcaggctatcaccgagaaaacaaaagccctcattatcaattcaccgagcaacccgacaggtgttatgtatacgaaggaagagcttgcggaactcggaaaagtgtgtctggagcatggcattctgatcgtttctgacgagatttatgagaagcttacatacggaggaaaaaaacacgtctcaatcgcacagctttcagatgaattgaaagagcagacgattatcattaacggcgtttcgaaatctcacagcatgacgggctggaggatcggctatgcggcgggttcggagacgattattaaagcgatgacgagccttgcgagccacagcacatccaatccgacgtccatcgctcaatacggcgccattgcggcctataacgggccggctgagccgcttgaagagatgagacaggcatttgaggacagactgaataccatttacgctcagctcagtgagattcccggattcacctgtgtcaaacctgaaggggcgttttacttgttccctaacgccaaagcggccgcagaaaactgcggattcaaagatgtcgatgaatacgtcaaggcgcttctggaagaagaaaaagtcgccatcgtgccgggctcgggtttcggttcaccggacaacgtccgcttatcttacgcaacgtcactcgatcttttagaagaagcggtcaagagaatccgccgctttacggaaaaacacagctgattctgaaaaagcggcttttaaagccgcttttcacttgcattgaccccgttagagtagaacgggtataataaagtgatgaaaaaagagattcaggcagattcctgaatgtctttcttgttctggagggaaagagtttgaaaacaacaatcaaccaagtgtataaacacacaggcgaggaagtaacgattggagcttgggtcgctaataaacgctcaagcggtaaaatcgcatttttacagctgagagacggtaccggcttcattcagggagttgtcgtcaaagctgaagtagaagaagacatcttccaaattgcgaaatcagtgacgcaggaaacgtcactttatgtaaaaggaattgtgaaagaggacgagcgttcaccgcttggctatgagcttgctgttacatccattgaagtcattcacgaagcgactgattatccgattacgcctaaagagcacggtacggaattcttaatggatcacagacatttatggctccgttcgaaacgccagcacgcgattatgaaaatccgtaacgaaatcatccgtgcgacttatgaatttttcaacaaagaaggcttcgtgaaagttgatccgccgattttgacgggaagcgctcccgaaggcacgactgagctgttcgcgacgaaatattttgatgaagacgccttcttgtctcaaagcggccagctgtatatggaagcagctgcaatggcgctcggaaaagtattctctttcggaccgacgttcagagcggaaaaatcgaaaacgaaacgccatctcatcgaattctggatgattgagcctgaaatggcatttgttgaatttgaagaaaaccttgaagttcaggagaattatgttgcatacatcgtacaaagtgtgctggaacattgtaagatcgagctgaacacattaggaagagacacatcgaagcttgaacaaatcaaagcgccattcccgcgcattacgtacgataaagcgattgaattcctgaaagaaaaaggctttgacgatattgagtggggagatgacttcggtgcgccgcatgaaacagcgatcgcagaaagctatgacaaaccggtgtttatcactcattacccgacgtcattaaaaccgttctatatgcagcctgccaaagatcgtgacgatgtcgtgttatgtgccgacttaatcgctccggaaggctacggggaaatcatcggcggttcagaacgcgttcatgatatggatttattggaagaaagattaaaagaacacggtctggattcagatgcttacaaatggtatgctgaactcagacaatacggttctgttccgcactccggcttcggtctcggacttgagcggacagtggcttggatcagcggagcgcctcacgtgcgtgaaacgattccgttcccgagacttctgaaccgtctgtatccgtaatagttatgaaaaacgaagtctcctgcaagggagactttttctaagtaaaggggaaagctcccggagataaccttttacagtaagaggtgtaaggatgaaaaaacagcaatttatagatatgcaggaactcggcatttcaagcattcccaacctgctgctgacacattaccggcagctcgggctgaatgaaaccgaattgatcctgcttttgaagattaaaatgcatttggaaaagggctcttattttccgacgccgtttgaacttcaatcaggcatgtccatctctgctgaagagtgtacaagctgcctgagaatgtttattcaaaaaggttttctgtttattgaagaatgtgaagaccataacggcataaagtttgaaaaatattctctgcagccgttatgggcgaagctgtatgattacatgcagcattctcaaaatgaaacgcaggaaagaacgtcagaaagagaacaaaaaagcctgtataccatctttgaagaagagttcggaagaccgctgtcgccgcttgaatgcgagacgctggccatatggcaggatcaggatcagcatgatgcgattctgattaaacacgccttaaaagaagccgttttatcggggaaactcagttttcgctatattgaccggattttatttgaatggaaaaagaatggcttcaaaacggttgagcaggcgaaggcgcacagccaaaaattccggcgtgttcaaacgaaacagaatgatccgcaaaaagagtatacgaggcaggtacctttttacaattggctggaacaataacatgagaaggggagaaacgtgttaaatttaaagcagattgaatattgtcttgaaaaaatcggcgatatgtttccgcacgcagaatgtgaacttgtccattcaaatcctttcgaattggttgtggcagtcgcattatccgcgcaatgtacggacgctctcgtcaacagagtgacaaaaacgctatttcaaaaatataaacggcctgaagattatcttgccgtatcgctggaagaactccagcaggatattaaatcaatcggtctgtaccgtaataaagccaaaaatattcaaaagctgagcaaaatgatcattgaagagtacggcggagaagtgccgaaagaccgggatgagcttgtgaagctgccgggtgtcggacggaaaacggcaaatgtggtcgtgtctgttgctttcggcgtacctgcgatcgcagtagacactcatgtggagcgggtctctaaacggctcggcatctgccgctggaaggactctgttttggaagtagagaaaacattaatgaaaaaagtgccgaaagaggattggtctgttacgcatcacagattaatatttttcggccggtatcactgtaaagcgcaatctccccgctgtgcggaatgtcctttgcttccgctatgcagagaagggcagaagcgtgacaaaaaagggctggtgaaacggtgacggcgattgacattctggcaggctatgaaacatacctgcgcagccttacggacttggaaagcctcgagatcaaagcggcgctgcgccgccatccgctgtatatggatttcagcggccagccaacagtgcagccatggagggaaaggggcgaatatgtcccgtttctttttcagatttggaatgaaacgaaagaaacgctgcttcccgtttttcaaacaagaaaatcgaggtgtgatcaaaatgacatgctgaagggaatagcctgtctgattgccgcttttcattggacggcaggggagcgggtcacatcactcgactggactgtgcttgaaacaaagcattttcccgcggaaccgatcaattgggcggagcgaatggcgtttattttaacaaaaccgactcaatatcactcgtttattcagctggatgaattgatgacggagatgaagaaacaatatcataaatatgaagccatgaacaaatgttaaaaacctccttttcccataaggaggttttttgtacgaaaaaaatccttcacctgtttggggtgaaggatttcgtccgctaatgagcgggatttgactggatggttgacgaattggactgcccgttgatagttgaagatgagtcttggtttttatccgtttgaccgctgtcaggtttatttgagccgtctgaaccggaatcggaatcattatcagagccgttatcttgctgtccgttgttatcggtcccgttgccgggctgattctgattgttgttatctgtttgatccttatcggattgatcctgatttttatccgggtcatcagttggtgtttgatccgatccgtcagacgtatctgtctgatcgtcatctttgtttgaatcatcggtttgcgtcttgtccttatctttatcttcatcagtcttctgttcatcgtcagtcgctttatctttatccgcatcgtcttcttcatctttcgggactttgaaagatgctgatgccgtatcgctttttccgtcatcgttttccgctgtcacctggaagctgtatgtggagcctggcgtgacatttgagacgacggcttcttttgccgaactgttttgaatgtcactgtagcttccgccgtcaacggattgtttgacattgaatgttgcatcaccgtcataatcccagcttaaggttaatgattttttatctttgtcgtatttcacttgcaatcctgtcggtttatcggctttttctttcgtgtacgttttagaaacggcagttggctgcgttcctttcacgaagtactccgtcacttttttatcatccggcgtattcggtccggctaaagcggcaggattcgagcctttctcaactgtttcttttacaacgctgtcaggctgcttgaagcttcctttaccgtcatcaacgtatgagatcagcttttggaaaatccgttttgcgacttgctggtctgcagaagacagtgatttcttgcctgctttgttgccagactcaactccggtccaaaccgccgctgtatattgaggggtgtatccgacaaaccatgagtctgggactccgcctggagcaatgttatatttttgaatgtcctctttagtaaagttggtcgtacccgttttaccggcgacttccacgttcgccacctgagccagtttacctgttcctgattcgacagctgatttgagcatatctgtaatcataaacgctgtgtagtcgctcatagcacttttcggtttcggtgttaaatcaagcttagtgccgtcattaaattcaatcgatgtgaccgcgtgcggttcgttgtacgttccgttatttccgaacgcactgtaggcgcctgccatggtcatagtagatacaccgcggttaccctcaccaaatccccgatagagtagggttcatatacttgatctttgtttaatcccaatcctaagtcgtttgcgaagtcgacggcatgatcttttcctgctgcttggtatgcttttaaagcaggaatattacgtgagtctgcgagggcctctcgcattgatatctggcctctgtatttattgtcccaatcatgaatcggtgtgccgtcagagtacgtataagctgagtcgtcaatctgttcatacgtcgaccattttttattttcaatgaccggtccgtaatcaagaatcggttttatcgtcgaaccgggctgggttttaccttgtgttgcataattgaatcccccggtagttctgttccgtcctgccccgatggcgcggatttctccgtttgtcgtatcaaggagcgtgacgccgccctgcatgccttcggtaaatccggctgtatcgccgttcatcaattgatcaagataatcttgtgctttcgtatcaagagtcgtgtaaattttcagtccgtcagttgaaatatcgacgtctttcttttcttttgtctcaatttctttcataacttcttcgacaaaagcgctgtatttatttgtgtcctttttatcgtattccttttggctgacgacgccttcatctttcatggacactttcttcgctttttggtattcagagtttgaaatgaatccttgtttttccattaagctgagaacgatgtttcgtcgtttttcggaagccttcgggtttttaaccgggttatatccggtcgggctttgcggcattccggcaagcgttgccgcctgttcaaccgtaagcttgctcaagtcttttacgccgaagaattcttcagccgcttttccgacgccgtaggcgcgcggtgagaaataaattctgtttaaatacatttctaagatttcatctttagaataatggcgctccagctgcagggaaagccacacttcctgtgctttccgtttaatcgttttctgatgggtcaaaagcgagtttttcacaacctgctgggtgattgtgcttcctccctctgaaccgaacccatccgtaaagttggcgaccaaagcgcctccgatacgaatcgggtctataccgtggtgcttataaaaacgggcgtcttcagttgcgataaatgcttctttcacaacatcgggtatatccttaatcgggacgtaggttcgtttttcaccgcccacttccgcgatttcttttccgtttttatcgtaaatcgttgaagagtaaggcgttttcagcttggcttcgtccaaagacggcgcgccggaaaccaaaacggcaaatgccgccgctccgccgactatgccaaggacaaacagaataaccaaggacagcacaatctttttgaataaaccgcctttacgctgtttcttgccttttttcggtgaagagggcttagtgcttttcgtctgccttgccttacggcgttcttcacggctcgtaaattgatctgacataacatctcaacctttcgtttatcaacctttcgctcagtctactgttcctgcgaaaaataaagctgttcaataatactaatataatcaattctcggtgagtatccaagggaaatcggaaaggaagcatcttctaattcgtctttgcgaattgattttctgccgttcttctcctttctctcccaaaagacaaacagcttgtcggcttcgaggaaataaacctttccgaaagcggatataataacaaaacaaatgccgtcttgcctgaccacctgcttcatatgctcaatctgatgatcatgaaaattctgcaggggaaatgccgttttgttttttgtttcttttgcctcgaaatcgatgtagcgtcctttataaatgccgttgtagtcagttgttgaagactgtttaaaataagcttccttaatgactgcggcgcttcttttcggatagtggacgtttacaatctggacgggtgtcggctttttgtgaatgacagcaatttggttagccagataatacttattcgtttcattcaggtcgtcttcgagggtcatgccgcgattactgtatgaatgagaccgtttctggctgttttgggatgaaaccgttttgttcggctgaaaagtttttccattcgggtaccgaatcactttttccatcctccttatcaaactaatagtgacggaagtgaatgaacgtgcataaacgacagaccgtaaccgccattcttcgcctgatcgaaaaagagacgaaaataaaaaatgccgataatatttcccggacgaatgcctataaagcatattatgaccgccatcctgagatcaagtggccgcttttggcatcctttgtgtcccgcaatgcgggctggtcgatgactgatttaagaggcgtcctttatcaggagggccttgacagcagtcagaaaaactggtttttcctttcgtatgaaagggcgaattggctgattttttctgatgcctatcctcagcttctggtctaccagtggtcaaaacaaatcggcgaacctcttttccgtcatcttccttatttccgcgtctcggcttttatgcaggaagaatggttccgcttttggcgtgacggagatacggaacggctcatgtatgctcttattataaatgaacaaaacactatccaagcacctattatacaaaatccttcgtttaaaaagaatgtttttggcacgattcctttttatttaagtgattggtttcactttaatacggtgatattcccttcatttgacggacatttatacggaatttccgtcaaacggttttcaaaaaccgaagagagaattacgctcggaaaacagctggcccgccttctgttcagccctgatcttcacgcttctttttaccgttttcttgataccgttcctcataccggttcacgctttgatatggagaaaatgatcggcatcaaaaaaagaacatcaccgatgcttaggacaacctatcccattgttgcccacccattagacggcgaaagggcggattggtttcaaaaaaggttaagaaaaggggctttcttacaggagaaaatgccgaaacagcttgaactgacggactggtacttccagaaaagacgggagctccatgcgctcttcgcggttaaagagtggctgaagaaatgaaaaagcccgaaaccgttcgctggggtttcgggctgctgatgtgttacgtggaagggcggtttgggccgcctaattttttatcaagcgtatcagtcgtttttgcttcggttttttgctgtttacctgcatttttcggtctcgttttcatacggcacctcctcaactgtatcgtttgcattaacgtgccggttcatacaaagtttgcggcacttttttgtcgaaaggcacgccttttaggataatctctgtttgtttgccgaactgcttctagttttgtcatgtgcagaggagagcggtatgaaaacgagaattatatttgaaagagatgcaagtgataaaagggaggaacatgaatgtctgtttacacgagcaaggctgatattctccgtctgctttctgatatcgaaatccggatttctgctgctgaaaaaacgcttacccaagcagtcagatgctgtcaggcggaagctgaagaaatcagacaggagaaactttcccgtcttgaggaagaggcgcgggagcttcatgtttgtattgatgacctgtttttgactgaccggcgtaaaaaggatttgccgcgagtctgccggataagctgattttgtgcaaaaactttggtaccatatgtactgaggtgagtccgtttgcagacacagtcgttattggagctgacagaacaaatgatagaggcggttctggaagccgaaaaaaggtatcaggatggaaaagagtcaggccgttcatatgatttttttgagacgattaaacccgatgttgaaaaaagagaccggctttgcgcgctttggacagaagcagcgcttgcgtttattcaggaaaaccgtccgaaatacgttcatcatgcacaaattcaggccgttacagaaaatttcggggagctgatgctccaatcatatgttcatcatattcataaaaaaagatacagggatttaactgaatctgttttatatacgcttcgtatattaagggatgaaattgaaaaagaaggcagctgaaaacggctgccttcttttatataaaggggtcgggtatgttattcatacgccgggttttctgctccacttgcttcgagaaccttcatactgtttcgaaattcggttgcggtgagatggccttgaatatagaggaattttgcaaagtccatcagtttatctgcacaatctgtttcatattttttcacttcagcaaaacgctttcttaagtatgatacgttcataatggtgcatcccctctcatgtatgttgagattatgttaacataacgattcgacttttttctgtttttaaaaaattaagactttcgacagcatttgacaaagagcagaatcaccgaaagcacataaccaaggcggaattcatacatatatagcagaaacttagtgagagacaagggggaatgtcatatgcaatggagagcgcagccatatcaaaatatgtaccagcagccggcgggatatttctacccgcagcagatacagccattacagccgccgtatccgcagcagatacagccattgcaacagccgccatatcatcagcaagggcagtacccgcagcaattttatccgaatcaggaatacggtcatatacagcagccgtttgctcctgctcctcctcaggcaggcatgcccgggggccagccggggtttgtgaatccttaccccgttcccagaccgaatcagcagcagtcttcccaattctcaggcatactctcccagtttaaaaaaacgaacggacagtttgactttaataaaatgatggatacaacggggcagatggtaagcgccgtaaatcaggtcggatcgctggtgaaaggcttcaccagtatcttcaaataaaaagcatgaatgatatccatcattcatgcttattttttagggaaaaagaaggtaagcgtctgttcattccaggatgtttccatatcttcttcacttaccttatacgggaggacaacggttcttgtcatgcttgaagacacatgggatgattgagcctgtttatgatcgtagcggattgtaacgtgaaggtagcaccctttcgtttccaccagcatatccccgtcacggaacgtctcgggaacgccgatatcaaccgcgagccccgtcggctcttctctgacgtcaatcgtcacttgcgcttcagtaaaagccgaattgacaaggtgctgaaaaccctgcatcaattctgcgaagggacctgagtgaaaaaattggtccatcgcatggctgatgatgtcctcattactttgcggatcaagtttatcgttttgggattgatccatatgaccaccgcctttttacaaacagactatgcgatgctatgccgtatggttaagaattgaaggaaaaaagaaagtatggttaaatagtggagaataaactggtaacggattcacatttaggaaggggagcacaacacattgctgaaaaaattattcggattgggagacagccggaaaaagccggccgaggaagtgattttttctccggctgacggagcggtgatggatttggcttcagtgccggatcctgtattttcacaaaaaatgatgggggacgggatcgccgtcgagcctgcaaacggagaaattgtttcaccggttgagggagaagtgattcagctgttccatacaaaacacgctgtcggcatccgcaccctttccggagcggaacttttgatacatgtcggtttggataccgtcaatatgaacggcgaaggctttgaagcgcatgtaaaagaaggagacaaagtgaaaacaggcgatctgcttttaacgtgccggctggatttaataaaagaaaaagcaagcagcaccgtcatccctatggtgattatgaatggcgatgccgcagaacctttgcaatttgcaggcgcaaatgaagcgaaaaaaggacaaacagagctttttacgataaaaatgaagtaggcaggggctgattccctgctttttttcttgtgcaggattttcatctagccaggcaaacaaatattcggtaaactgtacctcataaagaggtgtgaacgatgaagaaaaaatcactgagcgaactgattcaggaattaaaaaatcatgaaaatattgtgcattggcatgaagaggaaccgcgggaggcgaaaacgatgccgatgccggagcaagtagatccgaacattcgggcggctctcgaaaagagggggatcgagcggctttttacacatcaatactccgcttttcagacggttcaaaacggagaaagcattgtggccgtcacaccgacggcctccggaaaaacactgtgctataatcttccggttcttcagtctatcgcggaagatgccacaagccgcgcactttatttatttccgacaaaggcgctcgcgcaggatcaaaaaagcgagctgaatgaaatcatagacgagacgggcatggatattaaaagcttcacctatgacggagatacgtctccggctatcaggcagaaagtcagaaaggccgggcatattgtgatcacaaatcccgatatgcttcattcagccattcttccccatcatacaaaatgggtgagtctgtttgaaaacctgaaatatatcgtcattgatgaattacatacgtaccgcggtgtattcggcagccatgtggcgaacgtcatccgccgtttaatgagaatctgcgctttttacggaagcaagccgtcatttatctgtacatccgccacaatcgccaatccgagggagttggcggagcagctgacgggaaaatctgtgcgcctgattgacgacaacggtgccccggcaggaagaaagcactttgctttttacaatcctccgattgtaaataaaccgctgcatattcgaaaaagcgccaccgtggaagtgaacgaacttgccaaaacttttttaaaaaataagatccagacgattgtttttgccagaagccgtgtccgggtcgaaattattttaagccacattcaggagatcgtaaaaaaagaaatcggcgcgaagtctgtcagaggctatcgcggcggatatctaccgaaagaaagaagagaaatagagcgggggttaagagacggcagcattctcggcgttgtcagcacaaacgcactggagctcggcgttgatatcggccagcttcaggtctgcgtgatgacggggtacccgggcagtgtcgcgagcgcatggcagcaggcgggccgggccggacggcggcagggagaggcgcttatcgtgatggtggcgaactctgatccgattgaccaatatattgtgcgccatcctgattatttctttaaacgctcgcctgaatctgcaaggattaatcccgataatctcattatattggtcgaccacctgaaatgcgccgcatatgagctgcctttcagagccgatgaaacattcggagaaaatgatgcgagggacattctcgagtatttagaggaagaaggggtgcttcacgaaaaccgcgaacgctatcactgggcgagcgaatcttttcccgcctccaatatcagtctccgttcggcgtcacaggaaaacgtggtcatcgttgaccggtcagagacggctgatgtaaaaatcatcggagaaatggaccgcttcagcgcgatgacgcttcttcatgatgaagcgatttatcttcatgaaggggtgcagtatcaggttgaaaagcttgattgggaacataaaaaagcgtacgtgcgaaaggtcgatgtcgaatattatacagatgccaatttagcggtgcagctgaaagtgctggacattgacagaacggacagcagaaagaaaacggccttacatttcggcgacgtcaccgtgaacgcacttccgacaatatttaaaaaaattaaaatgacgacatttgaaaatataggatcaggaccgattcatcttcctgaagaagaactgcataccagtgcagtctggcttgaattaaaagaaacggattcggaaatcggcgaaaaaacgcttgaacagctgcttttaggcattgcccacgtcctgcagcatatcgtgcctgtatacgtcatgtgcgatcgaaatgacgtgcatgtcgtgccgcaaatcaaagccgcacatacgggacttccgacaatctttctgtatgatcattatccgggcggaatcggacttgccgatgaagtatataaacgatttgatgaaatcaatgaaggggctgagcgcctgatccgacaatgtccatgtcaagacgggtgtccttcctgcatcggctccgaaatagaaggaatagatgcaaagaaagcgatactccggctcttgaattacgtgtaaaagaaaagggggacgaaagatgtccttgaaaaataaattaaagcggatgaaaaaccacctgaatgtgccggaagctgaaaaaaagccggcagcttcacaactttcggtcccggatattcaagtcccgtttagagaagaatgggaggcattcggagtgaagcctttcttttttgaggatgaatactgtcttatccgcgaaaccgtctatccgctttcgcaccgccacggacggtacagcttcagtgaacttgatgacgtcatggcattatggaataaaggcggtttgacacatactttatcagcagaaggatacgaaaaaagccagctgttcttctttgatactgaaacgaccggcctcggcggcggggcaggcaatatgatctttttgctcggccatgcaagagtgtatgaagaccgtgtcgcggttaaacagcatctgctccctaaaccgggaaacgagacagctctttacaaaagctttttaagtgaggttgacattacgtcccttgttacgtataacggaaaagcctttgactggccgcaggtaaaaaccaggcatacattgctgcgggacaggcttccgaaacttcctgacttcgggcactttgatcttctgcacggggcgagacggctttggaaacataaattagagcgtgtatcgctttcggcggttgaaaatgaagagcttgcttttaaaagggacgaagacacccctggttatttggcgccgatgctgtattttcaatttttaaaggcggaggacccggctcttttaaagggagtgctctcgcataatgaacaagatgtgctttccctcatcgctctttacatccatatgtcaaaaaagatttttgcatcttctgatcagacgtcagaacgtcaggaagcatacgccatggcgaaatggtttatcgctcataaagaaaccgatcgcgccgttttgcagctggaagcgctgcaaggcaaagactttgaagattcggatcgggccctttttgacttagcgatgctttataaaaaacaaaaccgcaggcaagacgccgtgcccctttgggagaaactgacggactctgatcttcacacatgcagacaccaatcagcggttgagctggcgatctattttgagcaccatgcaaaagattacaaaaaagctctgcaggccgcgcagcaggcggcagaagacggggaaatatcggaaaaagaagccgagaagctccatgtgagaattgcccggctcaagaggaaatattcctcttgaaatattgcccgggaaagcgcaaaagccgagctgtttcgccaaaaatatttttttctgaatccgcatcgattttgttgtagaatggtgccgcatcttgtaaaatagcgttagttatttataggggagagttggtatgtataaaggtgttttttacttgttctttgtcgtggtttttttgattgcgtttgtattttcgaattttaaagacagtttgctgacacacttttaaattgggtgattgaattagaacatgcaccctcttttcttcataacctaacagtgtaataaaagttaatggagaggggatttagcatgtttcatcatcattgttgcagaccaaacgtgatgccgccgattgtccatccgactcattgctgtgaacaccattgcttttctaacacggttgtgccgcatattcatccgcaacatacaactaacgtaaatcaccacaactttgagcacgttcattactatccgcacactttttcaaatgttgacccgacaactcaccagcattttcagtgcggaagcccttgctgcgatcattagtattgaacgcttaagcaagatcggttaggatatcagcaaatcaaaatggggcccgatggggagccccattttttaagcaggtgattaattgaaagtattagccgtaacggggtacaagccgtttgagctcggtatctttaaacaggatgaccgggcgcttgtttatataaaaaaggcgatagaaaccagactcagaagctttattgacgaaggcttggaatggattctcatatccggacagctggggactgagctttgggcggcagaaacggcgtacgatctcagagaagagtatccggaattaaaggttgccgttatcacgcctttctacggccaggaggaaaagtggaaggagccgaataaagaaatgtatgaagcggtgcttgctcaggcagattatgaggagagcctgacgcatcggccgtacgaaagtccgctccaattccggcagaaaaacgcgttctttattgaaaagtcagatgcgcttttgcttttatatgatccggaggtggaaggatcgccgaaatatatgctgcagcaggcagaaaaacgccgtgaaacagacggatatccgatttattcgattacgatggatgatctccgtgccgccgttgaggaagaagatttctttacataacacgtcagagaatatttgacaacgggacgtgtttctgaataaaatataacatgatgattcacgatatgaggtgaaaaagatgcttgctgataaagtaaagctttctgcgaaagacattttggaaaaagaatttaaaacaggcgttagaggttacagacaagaagacgttgacaaatttttagatatgattattaaggattatgaaacctttcatcaagaaattgaagaactgcagcaggaaaatctgcagctgaaaaaacagcttgaagaagctagcaaaaaacagccggtgcagtccaatacgaccaactttgatattctgaaaaggctgtccaaccttgagaaacatgtattcggcagcaaactttatgacgaataaggcagatgcacttgtcaaatgagacaagttgctttataatgaacaagtgttcttaacgttcgggtaatcgctgcaggtctttgaatctgtagaggaaagtccatgctcgcacggtgctgagatgcccgtagtgttcgtgcctagcgaagaaataagctagggcagccttgataggctgacggcaggaaaaaagcctacgtctccggatatggctgagtatccttgaaagtgccacagtgacgaagtctcatcagaaatgttgagagtggaacgcggtaaacccctcgagcgagaaacccaaattttggtaggggaaccttcttgaaggaactgaacagatagaaggacagaatactttctgtagatagatgattgccgcctgagtacgaggtgatgagccgattgcagtacgacggaacaaaacatggcttacagaacgttaaacattattgatatgacaaattagagctctcctttaaaggggagcttttatcttgaatgaaacgaaagcttaaaagagacagggtgatacgatgaagaagtacacactaatagcgacggcgccgatgggaattgaagcgatcgtcgccaaagaagtgcgtgatttaggttatgaatgcaaagtagacaacggaaaagtcatttttgaaggagatgcgcttgcgatctgccgcgctaacttatggctgcggacggctgaccgcatcaaagtacaggtcgccgagtttcaggcaaaaacgtttgatgagctgtttgaaaaaacaaaagcgattgactggcgcgcgtacattccagaaaacgcaaagttccccgttatcggaaagtccgtgaaatcagtgcttgccagtgtgcctgactgccagcggatcgtcaaaaaggcgatagcgggaaagctgaaacttcaatcaggaaaacaaaatgaatggattgaagaaacgggacccgagtataaggtggagatttcccttttaaaagataaagccgtacttacactggattcatcaggaacaggccttcacaaacggggatacagggttgatcagggcggagctccgattaaagagacgctcgctgccgcgttaattctgttaaccaactggacgcctgaccgtccgttcgtcgatccgttctgcggttccggcacgatcgccatcgaagccgctttaatcgggcaaaacattgctccgggttttaaccgtgattttgcttcagaagactgggaatggatcggaaaagaactgtgggacaaggcgcgccttgaagtggaagaaaaggcgaactatgatcagccgctgcagatttttgccagtgacgtggatcaccggatggtaaacatcgccaaagaaaacgcagaagaagcgggacttggggacctgatcgaatgcaagcagatgcgagtgcaggattttacgacgaaactcgaattcggcgttatcgtcggaaaccctccgtacggcgaacggctcggcgaaaaaaagcaagtcgagcagatgtataaagaaatgggccgggcatttgaatctcttgatacatggtctgtctacatgttaacgtcaaatgaacaatttgaagaggtctacggaagaaaagcaacaaaaaaacggaagctctttaacggttttatcaaaacggattattatcagtactgggctaaagtgcggccgcagcggaaaaagccgcaacaaagagaagacgcctgatacagcgtcttctccggcatctttacgttttattctgccattaccagcggtgcgcttttgcgttgctccgtaaaataatgttggtctgggacatttcggtgtggccgttcacctgcgatttagagcgtttcggccgcgtccaattgtgatgaaacaattcagaatgctgatctaatcgatctttataactcatgtaaccatcactcccggatagaataattttgtgaagatggatattcgatcgaatatctgttgtagtttgtgcaggtcaggtgcggatcattcaggatggcatgtatagaaagtgaagcatcggcatagaatgatgattatttctatttgagaggtgatcttattttatgctgaacagcgagcacttcagtaaaatacaaaaggcgttagacgcaactgctttccggctggaggaagccggagctaagttcggtccttccgtcatgacacacgcacaggaagaacttgaaaatgcggtaaaacatacacattcaacagaccatccgttcctatgtacacatatcattaaccggaaatgataatgacaaaaacttggcgaggccaagtttttttgttgtattgaaaagggttaaatgatattatagatggtctgaatgccgaatagttaggggttggagttgggtgacaacatcacgtttgccttttgctttaacaaaagaaaagaatttttacgaagaattgaacaattggattggtgacgtgttttacgatatccttcccgagaaaggctttgaccttcgggatgagcaggtatttatggcgtttcagcttgaacgggcatttaaagagaaaaaggtcatgttcgctgaggcaggagtcggtacggggaaaacgctggtgtatctgctgtttgccatcagctatgcaagatatacgggtaaaccggccattatcgcatgcgccgatgaaacgttaattgaacagcttgtcaaaaaagaaggcgacatttccaagctgacagaacatttggatctgcagattgatacacggctgtccaaatcccatgagcagtatctctgtctgaaaaagctggagaaaacgatgcagcgttctgatgatgaaaagtggctggatctttatgagtcgctgccttcattcgtacacgaatcacaagcgatgcagcgcttttatccgtacggcgaccgcaaacagtacgctgatttgacaaatgaagagtgggcaggcgtcagctatgattccttccaagattgtttaacatgtgatatgagacatagatgcggtttaacactttcaagagatcattacagaaaatcaacggatctgattgtttgctcccatgatttctacatggagcatgtatggacggaagaatcacgcaaaagggaagggcagctgccgcttttgccggatcacagcgccgtcgtgtttgatgaaggacatctgctggaattcgccgcgcaaaaagcgttaacgtatcgtgtgaagcagtcgacgcttgagctgtttttagagcgtctgcttcaaaatgacatcagagaggaattcgccgaactgattgaagatgcccttgccgcaaacgatgagtttttctatgtgctgtcagaggaatcgaaggaaatcgccggctctcaccgattggacatccaaaacgaccagcgtgttaagcgtgcggctgacgaactgtgccgtctgctcgataaaatcggcgaggcgctcgtatttgaatcggaaatgtatacgattgataagtacgagctgtcagttgtagaagaatacgtcgaacaaatggcatattcgctgtcgctgtatcaaaaggatgccatcagctggcttgaaacgcgggatacagactcaacgtttgtcgttatgccgagaactgtagccgaagttttgggagaaaaggtcttttctaaaaagataccttatatcttctcatcggccactctttctgagggcggttcatttgattatatcgctgacagtctcggaatccgtgatcctttatcatttaccgttgaatctccgtacgattacgaggagcaaatgtctgttgcgcttcacggtgacatgacgtctgagcagaaaacagtcgaaacgattgaaaccattaaggagaatgaaggacgcaccctcgttcttttcccttcctttgaagacatgaaggaatttaaagaacaggctgccgcgtgggagctgccgtatccgatttactacgaaggtgacgaagagatcagcagtctggtcgaaaaattccagcgggatgaagaatccgtgctttgttccgtccacttatgggaaggtcttgacattcccggtgactcgctccggaatgtgaccatttgggcattgccgtatccgcctcatgatcctgtgtttaccgcaaagcggaacggagcgaaaaaagatccgtttgaggaagttgatctgccgtacatgcttttgagagtccggcagggaatcggccgcctcatccgttctaatcaggacagcggaaccatatccatttatgcgggcggagaaagtgaacgggtcctggccgaagtcaaaaaggtcttgcctgttacaccgaaaatcgtataaaaacaagagctgcaggaatcttatcctgcggctttttttaatccgggaagttgactttataacggcgttccattagcctgtaattgatagtgaaaagggaggggaacggatatggatgtacatacatatgaaaaagagttttttaatctgttaaaaagagtatcccactatgaagaagctattgcgctcatgcattgggacttaagaacgggagccccgaaaaaaggctctgatgaccgggcggaaagcatcggacagctgtcggctgacgtttttcaaatccagacatccgaccggatgaaagagctgatcgacatccttctcgtgcatgcagaagagctctctgaagatacagtgaaagcggcggaacttgcgaaaaaagattatgatcataataaaaaaattcctgaagatgagtataaagaatatgtcattttaacatcgaaagcggaaacggcttgggaggatgcaaaggcggcctctgatttctctatgtttgctccgtaccttgagaagctgattgattttaataagcggtttatttcttactggggctatgaagatcatccatacaacgcattgctcgatattttcgaaccgggtgttacggtaaaggtgctggatcagctgttttctgaattgaaggaagcgatcattccgcttatcaaaaaagtgacggaatccggcaataaaccggacacttcctttataacgaaaacgtttccgaaagaacaacaaagagacctctccttgtatttcttaaaagagttcgggtatgattttgacggcggccgcctggacgagacggtgcatccgtttgcgacgacaatcaaccgcggcgatgtgcgggtgacgaccagatatgacgaaaacgatttccgcacggcgattttcggaacgattcatgaatgcgggcatgcgatctacgagcagaatattgacgaagcgctgagcggaacgaacttatctgacggtgcatccatgggaattcatgaatcccaatcgttattttatgaaaactttatcgccagaaatcaacatttctggaccgcctattatgaaaaaatggttgaggcttcgcctgatcaatttcaagatgtgaaaagagaggactttgtacgcgccgtaaatgaggcgaaaccgacctttatccgaattgaagccgatgagctgacatatccgcttcatattattatccgttatgaaattgaaaaagcgattttcagcaatgaagtgacagtggaagaactgcctgcattgtggaatcaaaaatatcatgattatttaggcattacgccgccatctgacgcaaaaggcattttgcaggacgtacattgggcgggcggcgatttcggctatttcccttcctatgcgctcggatatatgtatgcggcacagctgaagcataccatgcttgaggatctgcctgaatttgatcaattaatagaacggggcgactttgagccgatcaaacaatggctgacagaaaaggttcatcagcacggaagacgcaaaatgccgcttgacatcataaaagatgcaacgggagaagaattaaacgttcaatatctcattgagtatctcgtcggcaaatattcaaatttatatttataaacgaaacgcccggcatacaccgggtgtttttctaaaaattctaaaaagacgaataatcgaaaactaattctttgtaaaagttcggaaatattcaaatttcactatgcaaaagaagtgtatcttgttataatttgattaatatcatacgaacactcatataatcgcgtggatatggcacgcaagtttctaccggtcaccgtaaatgtccgactatgagtgagcaatggaacggctttattcggccgttacgtgtagatcattcggcattgcttgctctttttttggagagcgggcaatgctttttttattttttataagcgggggtaatcattgtggaagcattaaaacgaaaaatagcagaagacggaatcgttctttctgatcaagtgctgaaagtggattcttttttaaaccatcaaattgatccggttctcatgcagcagatcggccgggaatttgcgcggcgttttgaaaaagacgagataaccaaaatcgtcacaattgaatcttcgggcattgcccctgcggtaatggccggccttgaactcggcgttcccgtcatctttgcgagaaaaaggaagtctctcacgttaacggatgatctgctgacggcgtccgtctattctttcacgaaaaaaacagaaagtcagattgcaatctccggaaatcatctctcgaaagaagaccgcgtgttaatcattgacgactttttagcgaacggacaggcggcagaggggcttttgtccatcgtaaaacaagcaggcgcagcggtttgcgggatcggaatcgtcattgaaaagtcatttcagccgggaagagacgagctggtaaaaaaaggattccgggtcgaatcactggcgagaattcaatcgcttgaagacggaaaagtgacatttgtacaggaggtccgttcatgaaaaacggctatgccaaaacactttccctcggtatccagcatgtgcttgccatgtatgccggcgccgtcgtcgttcctttaattgtaggagcggcactgggactgaacgcagaacagctgacatatctcgtatcaattgacatttttatgtgcggggcggctacgctgcttcaagtatggaggaataaatgtttcggcatcggcttgcctgttgtgctcggctgtacgttcaccgcggtagcgccgattatttccatcggtaaggagtacgggatttcagccatttacggaagcattttggcatcgggtctgcttgtcattctgctgtcatttttcttcggcaagctcgtatccttttttccgcctgtcgtaaccggatctgtcgtaagaattattgattgagtacgacataaacctagttatagtagaccttgatattcaaattcttcgtaccatctcccaaatcctcgaccgtatacgttacatgactaatgagcatctttagtattaagtttatttcagagttagacatcccctcagtagactcaatcatctcctgcactttatgatgactccatttttctttttttgtctcagcgctaagagcattttgaaactcagtagatgcaattaattctgctaaatcattttcagctttttgaagtgtctcttgtgaaattttcagcttttctttgtactctgttttactgatgtccccatctaagtacatttcctttatgcgttctattcttccctttgcctttttaacagctttttctcttaaaccaataagctgagttgtataagagtcatcattaacatcttgctcagtaggggagaagagagcttcattgtatttttttatttccttcataattgactggaacaatacttcttcatgaattccttttgtttcttcgcattcttttgttctttcagcagattttcgtaaacactttctaacgtgttttcttctgcctttgggttgttctatagcttgtgctttatgacaataaggacatctaacaataccagaaagcctgtgggtattcatatttaaacgtcttccagccactttatatgttctaagtttttctattctattcaggattagggcatgttcttcatcggttttcatggtttcatgatgaccttttgcaattaatacttcatctagatttttattttgaacaatactgttgttgcttttgcttttcttgtatttaccaaaccatacataacccctatgaaaatcgttggacagaatttctgaaacaacttctccgtaccaaatggaacggccggatggggaagggactttcagttcgtttaacatctcagcaattactgtgcaagaatattcctcttctaagaaccatttaatcatcattctatatatttttttcttttcctcaacaactactgcagctttgagattcttgtcccacttataaccgtatggaacagaccctgaatgcagtctgccttctcttgtggcatttttctttccgttaatcgttcttcgttttattgctctatattcacttcgagcaattattgattcaaactcagaaagcatttcgtcgccttcaattgataaatcataggttttttttggtgtaataaacaatgttccactctgcttaaatgcttcaagtatacgtcctgaatcaatttgtgaccccctagagagcctgtccattgctacagcacaaactgcatcaaactcaccattttcgattcttggcaataataatgagaacattggtcgctcatcaatagtctcacctgaaacaacttcttcaaaccactgaacatttttaaagttctctctttttatgagatattctagctcatttctatgtttggcgagtgtatcttctgaatctctgtcttctctggattttcttgaataaactgctattcttgaattttcgtgtaacgccaagtatttcatcctttcttcttattgtaagtgtagttagattatatcatgtgcattggaatttctttataaaatcctcattttaacgaaacattttagatcagcttgcttattaatctaatttaaagtatcctaattgatgtatcataggggtttaacagccactatagaccacagagtccctcacagagctctgtggtttttatttagatagaatatacccaaataaaaaaagaagcctcagagggcttccgatggattaattcttctcacatgcaaagttgtcattatcgcgatccatcttagatgtataagcagggtgagtgcttggtacgccatgcgggtatttctttctcagctctgtgcagtttgcaaagtgttctgttcctccagcagaaggggaggcttgtgcagagttagaagagctgcttgatgctgaactgcttgaatttgaattgctagggttcgatttatgtgtctcggattggtgtgttgtaactgacttttgaaccggcttagatacacttactgatttcttcggtttcgttgcgcagccattaaatcctttatcagtcgcatatccattcttactccaaatcttcaagtctttatctttcgcagcttgctcatctttcttatacgtgtctaaatacttcgtgtttggctcatatacataagctactcgtgctaatccttctttaagcagtgtttcttgtactgatttgccatctgcgtaaacgtaagccaacattctgccatacttatctgtgcgatctcctttatcaaactccagttgaagcttgccctcgttaactagctgtttatttcttgctgaagcatcctcaccatatggttgtacgcaagagtttggtttcttagtttcaggagtgtcaacaagcaaataacgaactgttttgacttcgcctttatagttaactttaatcgtgtctccatcaaccgttctgttaagtgttacatcgactagctttttcttattgtcagatgtctttttatccgacgaatccttctttgaagcattttcggctttttcattcttgtcattattgcttttgtcgtttgattgagagtctgtctttgtctcttttgtatccttttcttcttgttgcgttgttttagccttatctgaatctgttttatctgtagaagcagaatcagacccacatgcagccaaagaaaagcttagagataatgcgccaatacctaacaaccatttcttcaatgtaattcccccaaatttgtttgttctgtctctatatcggacaaaccttcctaattataaatataaaaccaaagattgtaaatttgattttgtcattttaaaacactcaaataaagttgtgtggtaaaatttagtggtctaaaccttagaggagggaaagttatatggaagaagggaagttaattcaaatgactcttaatggaataaaggaagctgtttctaaatacggaacattccctatgtttcatcatggagggtatgtcatggaagatgctacttttcatttcaaagatcctgctagtcctcaagaaattagcgatatagaacagaagctaggtgttaccttccctaatgactataaagagtttttgttacagcacaatgggatggaaatgtttgatgggattgaaatacttagcttagagggaatcattgaatataatgaggttcaagatttcccagagggatacgttttaattggatatcattttgatggaagatatgtcatagacacaaacaaatcaaaaaatggattaggttatatgctatatctagactcaattgatgatattgaagatgcgattaacttagattcgaattttgaaatatggtttgatatgttagtttcttccaatggaacgaaatattgggaagtgaatccgaatatccgagagtattataaactggtttcagaataaaaagactccgcataggagtcttcatctacgttcatctacaattttacttcttttttgtataagaagcccaccatggatttacttctttcctgtgaaaattcacatcgataggaattaaattgcttgtctgatttcctccaccgtactctctaggtagttgatgatgaatctcaaatttcacccaagtttttttgccgtattttttatcataccatttcctatatgctttgcgttctgtagttccccattttactcttttatcgctaggcacccatttaataaatgcattaggtggagctaatatatttaatcctgattgcttatctgtgtaattggaggggaaaaacattcccttcatattcgttaggtataatccttcagtccaggatatcgttctaacagttggttttttccctgcccaagtagcaattgcgccgccagtatacttccaaaatgttgttttgtttacattaataaattgatgaacttccgatccctttttcacttgaggccctacaaaggtctttctaatagtatgggggcaagtaaactgtttattataataaccacttttgcataaaccctggtgtacttctgctgacgcaggaggaatccctactatttttgaaatttcaactccgtgcatcactttattaacttttccacctaaaaaagtgtgactgaaatagataatactttttgcttttttctcaacagttttccgttggttttcagaggtgacttgtccagatgatgtctgattaccatctttgtcataagctatataagtctgatatgaactttcaacatccattccttgttccttagcaattttttgcaacttactttctgatccagctaattctcttttagaggaatcggtgttttgcggtttttcgtttactgttgagatacgtttgtttaggtcaatgccagttgcattattatcagtgatttctttgtttgccgttgcctttacatcatggaggggatagcaagagaataataaagagagagctattacaactaaccaaatgctttttgacacatacttcataatggtttacactcctttttcttctgtttaaacctgctatgagtatctaagatgtaaataaataatatattttacaattaatacctccttccgcgaggatagtatcaccttttccattttttatcaactgaattaagcctattttaagattttgttaaagttcaaatctcctaagaaagagaccttcgacaaaaggaagaagctctccttacatgtaattttatgtggtaaaatttagataagattgagtgggaaggagacagatatgaaggtatttgaagcatcctcgttaatctcagcagcggaaaagcgagcaaaagaatacgatcagattagagaacaatttatcaatctcagaaaagcatttcaaggaatggctgatttagatgacagcgagttttcaggtaaaggtgctgataacattaaagcattcttccaagatcacgctggtgttacagacagctggcttgatctgatcgatatgaagattgcttttcttaacagtatttcaggaaaagtagctgatgccggattagccgattcgtttgtggaagagtcatttttagagcatgagttgattcatgcgaagaataagtcaaaagccatcatgcaagagcaacggaatgaaatgagggatattcttaatgagataagtgatattgttcatcttgatgttttctctacagaggatgtcgatcaaaagctggattcagcagataagaaacgggacaataccatacacaagctcggaaagctcgatcatgatctaacgaaggaatatgcagaaaccgaagcgaacgagcatttcatccaagccgactttcaacagcttcaaaatgccacgggtaaagggaaaaacgcaacaccacttcactataacgccaaggcgtacagagaaagtgacatacataagaaaaaaggcgagattgcaagacattcggatgcttatttgacgattaaaaaggaagaagcgaaagagcgggaaatcaaggatctgaagaaaaagctcgctgacggtgtgaccgatccggatgaatatttagaaatcgcgaagaagatcggctatgaaaaccttgaaccttcccaacaacaatatgtgatgcagcttgaacaagcaaaacagatggaagaagccggagaagtgacttgggatattttaaaaggagccggcgttggtttatatgatgtcgggaaagacacggtaacaggtttatggcagctgatcagcaagcctgatgaagttgttgaaggtatcataggggcagttgctcatccgattaacacgtataattccatttcaacagctattgaggaatcgtatcaaaaagatatggtaaatggagatgcttactccagatcaagatgggtgacatatgcgataggtacggtagttacctctgtagtaggcacaaagggagccggttctcttacaaaagctgacgtagcaggaaaagtcacctctaaagtcagtaaagcaggccaaaaactgaaagatgtctcaattgctgatttattgccttataatccacgttacgatgttgttccggctggaggagttccttataatgtagttaacggtgagaatttaaaggatcgtctgcttcagttaataaagtccgccaatcctagaacaaggttgcctagaaatcatgggagatgggaagggactcctggtaacggtaaatggcactcagatagacctgacgttaatgcagttactaaaggagaacccgtcacttttatagatggcagaccggtttttacaccatggagcaaagggacgattaagtttaaatcaggagaactgaaaggtactaaaaaggattttccagcagtttataaacgtattcaaaaaatgaaaggctttaaaacccaaaaagaagctgaaaaatggctgaaagaagtagttagattaacaccgcatcatttagacaataacaccatccaattaatccctatggatttacatggtaatatacctcacgtaggttcggcatctgatttaagaggaggattttaatgggtatacaggcaatcaagaaaaaaatgagtgaattttatttagatataagacttgataagaacataaattctcatcaagtccttaaaaagtttgaggacgaaaattctttcgacataacagatgaatataaagagtttctcaatttatacggggaatgctggatagaggaagataatgtgtttttccctgttttagaggacaatccactagcagataacggtaatctccggttgggatatttctacggtcttaataacaatgatgctaatattatcaaattaaaagaggatctttcagaacaaatgccggactggattataccgattgctgatggtgacggaggagatcaaatttgtcttggtgtgaaaggagaagcaacaggaaaagtttatttttgggatcatgaattgacaaatggaataaaagacacatttttggtcgcaaattctttctctgacttcattcaaagtctgtttattgaagagacaacagatgaagacgatggtattttatctattgagctagatgatgatttattaaacagttaagcaaaagtattgcaattgcatgatgtagcagcataagtgtccttaggcaaagtgaaagtggtttaatccataaagcaatagtattgcaaataccatttttatgtggttataattagtgtagatgatacagttatataattattttttgcatttgatttgtggaaatgcataaaataaaaagaccagggtgttggtagcaccccggctctgtacaaaaagctgcccatcaaagggcttgctcagcagttgttcatgataggcctaacccttcaggtttccaggctcaagggaggtctattttttatttatatacgtcaacagggcgattataaacgacccgaatgcaagcattaacattaatgcctgaaatgttgacataagcatcaccccctttcgtaggggatgagcaagactcccttgagtgagcatgctttaatgtacaggaatcattatacactaattccaaatatatgtctgtgattattggagccttattgacaatagacaagttataatgtagtacttttctttttgaaatttgtgttataagatatattaagattttcaacaagagaggaaatttatcatgaagaaagaaattttgctaattcataatggctcaagcattacatatgcagacccacatgaagctgctaggagttatgctaaagctgtcattgatggggtaaatcctaatgaaatagaactatatactgacattgccgtaaatcttaaagaccaagctaaactgatgaaacaatttaaccaggaactatctaagattgtaaatacaagaattcctatgatggaagaaaacacaaaagagctaagcaatgaaatggaaaattcacatcaaatttataagggaatttcaaaagaaagcataaaaagaaaaaggattagaaaaacgaaaataagcaggctataaaaatagcccgtcatttgcgtgatcagaaagaaaagcaatactttgtgccggagtttttaagtgtgaaaataaattactatgtcccccttacaagcatacattgtgatatgtaaggggggatttttcttgcctagataccggagcgctcttcgcaagagagggcctttgccttttcggtatgtgttgcttctgtcgtttgctttttttatcatatcgacggtcatcagcctctggatgatcaactcctcaatcaaaccggtgctgatgaacataggagaaatggaaaccaaacgggtggcgacagaggtcattacggaatccattgaagaatacatgtctcacagcgacaatgtgaaagatatggtcgatatgaaaacggatgaaaacggaaaagtcacaacgatggattttaatacacaaatggtcaacagtatgaaggcgaaagtgacaaagcagcttcaggctcatttgaaggaagcggagtcgaacaataagcagcatgaaacggaaaaaggcgcgaaaacggccgatgaaattatgattaacatccctttagggcaggtcacgggaaacagcattctcggaaatctggggccgaaaatccccgtgcgctttaacctgatcggtgatgcgttaactgatgtgaaaacaaaaataaagccgtacggcattaacaatgccctgatcgatatcagtatttttgtggaaattaaagtgaaggtcattattccgtttgccagtaaaacatcagtcgtgacaaataatattccggtctccattaaagcgattcaaggagaggtgccgcagttttataacggaagcggcggatcaggtgtgacgccttccatccagctgccgaatgaaaaaaaggagaaagacaaataaagacacacagccgcattttcttctggcggctgtttttactttttcctgcggatttcttgaaactgaactcaagtatcgactagagcagcccataaagcttagtggatacttgctgaatagtcatttccaacaattacatcgaactattgttcttatttatattgaataaagaacatttgttctgttaatattagatcaataaaggagtgattcaaaatgcttagagatcgaggggcgatcaaatggacttccatgatgcttccagaacatttaacgcaattaaaacaggacttgttagatgtttcgaaaatggagaagccatctttagatgagcaacaaattgaggagattgacatcctggtttctgaagcaatggcgttgaataaagaactaaagtttaagctctttaaagaaggggttgctgaggatttaatcggtacagttcaatatctcaattacgaacaacacaaattacacgtaaaagatcatcatgatcaaaccgtatacatcaccatgaatgacatcataggagttgcttacaatgattgattactcacagtttccacgtaaaaatatactttgtgtagatatgaaatccttttatgcttcggtttcagctgtaacaatgggattgaatccaatgacatgttatctcgctgtagtcggaaacacggatagacagggaagtgttgtcttagcagcgtctcctgcacttaaaaaagattatggaatcaagactggctcccggttatttgagattccagatgatccaaaaattcatatagtaaacccgcaaatgaaacttttcatcagagtttcaactgaaatcactaaattgttttacaggttcgttcctgaaacatgtgtgcacacgtactcaattgatgaatcttttttagatgcaggaaaagaaaatcctgaagtcatggcagaagcaattcagagcagtatgaagagagagtttggcttagtttgtactgttggtattggtgacaatatgttgctgagtaagttagctcttgatttagagagtaagaaaacaaagactgggattgcacggtggagatatgaagatgttccaaataagctttggtgtgttcatccgttatctgaaatgtggggaataggagggaggatggagaggaatttaaaccggatggggatttcaactgttggtcaattagctaaatatccattagagctacttgaaaaacgattcggcattatgggcaatcagctttattatcatgcacatggaattgacctttctgaaattggagctcctttgatgcaagggcaaataagctacgggaaaagtcagatattacttagagactatacgaagaaagaggatatcaaggcggttctcttggagatttgtgaagaggttgcacgaagagcacgaacacataacaaagtagggcgcacaattagcttgggtattggttacagtaaagatgagttcagcggcggctttcacagagctaaaacgattgatttgcctacaaatatcacaatggatatttatcgatattgcttgatgttgtttgataaattctatacaggcaaaacggtacgaagtgtttcagttaccttatccaatattgaggatgatgtaaatcaacaattaagtctgtttgaaaaagataatgagaagagaagaaagcttggattcgttatggacgggataagaaacaaatacggatctaaagcgatcttacgagctgtttcttatacacctggaggcacagctttgcatagagcaggtttgacgggtggacataaatcatgagaacagagagcagctccctctgttctccttacaaagtcattagttttttacgtttcggctctttcagcaaccttgaacgtatcattttgttgttggagataggaagcacccactgttccggcaacgccgaataatagaactgcacagataaatagtttagttttcatattgcttctccccttttgatttgtcttcttgcttcatttgccaaacgataaaattcaactgcaccccaagcatcctgttttccagtgagaaaatctgctacagagacaccatagctttccatgtcagggtatatacttctttctttgaagaactcgaatgttttcctaactaagtctaaatcatagtccaagaaaagtcctttaaccatttttaacttttcaagtaccatttcattgttatgccgttcagccaactgtttggcctgttcataaaatttttttgcgttttcaatgtcattttgccttccctttaagaaggagataacaaataatgttttagcagcgtaatcatgattttccggctcaatgatttgaagtgacttattaaagtgaaaaaatgctttatcaagttcttccatttgattataacataatccaatattaaacagtgctgaacgcatcaaatgcccacgattcttttcacttttgtttagctctactgcttcctgatacgctttgtatgcttgctttaaagcttcatcaaacttcatactgtccaataaattaccaaatatgacgaattgacagcgtaccttttgtaccccgtatgtagggctcccgtcaatagcaggttgctttttaaatatatcgtaagccctcatggcataattcattgaaaaataagtctgtttcatgtggtaatacacttctgacaatttaaaataaaattcagctttttcaacttcaatatcttcgctctcaattgaatccaaatatctctcagcttgtctatagtgattaagggagaatgccaactccttttgtctaaaatagaacatgcccatgaaaaaataatagtaatattcgagcattccagttaagttttcatggccttcgtatgcttttaactcaccatagtttttctcaatgtcttttatagcgttaggatacatatatgccaacattagcttatgtctaaactcaagtagggagtagtatagtaaaacatcttggttttcttccataatttttatttcctgcataacttctttacgcatttcttctgctctaccgacccaattctttttaatagccacataccaatgattcatctttgttgctactaaatcataaggaatgaccttttcgttctccaagtcctaaacccctttcaaatccattttattatatagttgcattggaggaaagaaatgtaaagggaatttgagtgaaaattaaaaacaaatcaataattcgattatgaacgaaacgaaaaaaataccctcctcgttagagaagggtatatgatcagtttgctgttgcttttagagaagcaagccactcatctaatgttccagtgaagccttgttgaacggctaattcatatgctgattttccatctttaccggcagcaccagtagctcctttagcaccggttgcaccagtatcacctttgtctcccttagcgccagtagctccagtgttgcctttttcaccttttagtgaagctaaccattcctctacagttcctgaaaaaccattgtccactgcgatttcataagcagacttcccagtgacaattgagacattaaccattggattgaaaaaactcatttatgcgcccccaaaaagttatatgtaattcctgactcagaaattttgaagcttgtgataggtgaatcgtgagcgtccatttgaaagccttgtccagcccttaaatagataggatctccaccattgattgatacgtggcatttctgatcattcgaaaagctgaacttatagaaagaatatttaatcgtccaggttgcaggtggggaggggattacttcatggttagattctgacttctcaagcattggacttccgatatatccagatcctatttgcataatcaacaatcattcctttcttcttgaaaatgaaaaaaagggggagataaactccccaagttattttggctctgtgtattccatggcttgatcgctgtctgagatacctgtagtggttggatccactacaaccccattgcagttagaaatgtaagcaaagcattaaatttctcagtaagatcatcgctaaacacagaaatgtcgtatccaaatgcagatgcaattgcttgtgcaaacaaaagagttgcagagaagattgcaaccaggaatgttttctttttaagtcttactttccagttaattttagtcattaaatcgtctccttataaattagctaatttggtgatatcaacaccagcgatctctgcaccaagcagtaagagaataattagaactaaaatctttaatgtcttgccgaatgttccttctaataagttttgaagccattttgtttgcgactgattaacttgctgaaactcatttcttagtccagctatctcagtggtgaacaaattttttgtttcaacaaggtttttttcctgattctcaacaacagtggtaagcctaatgagcgattcacttgttgttttttgtgtttccaacatgatttttctatcttctgcttgttctttaagacgttcttttatatgagcgacctcggtctttaaaacttcatagttttctttttcagccacaatgcaatcatcctccataaaaaataggaggtaatgtcacatcacctcctaaataatcattgatacactttgagctacaatcattctcaaagatatttaaatatatttagatttttgagccaaattgtcctgagatgtagcctcgtttacctttgtagataacttcccagtaacccttagcattgtttaaccctttcactgagccagaaatgctgacggtatcacctagctccacagtgccgagattcttcgctttgtttttatcaggtctgtccattacgatagcagcgctttttactccgacaactttaatcttgcctacagatttgattccactgctatcaggcttagaagtgggtttaggctttggggttgattttccaagctcagcatcacttttaatgtatttcacatttacatatccgctgtatgtagcgcctttggagtttgtatatttgatataaccccaaccattttgagttgatcctttttggtattggacagtggagcctttaggaagggcaagtacaatagaggagttcgcattgcgctgagttctcacattaagactgtctgcgataactgtgttcttaacataagagccatttgttttaacgacttttgttggctttgaagatgaggaagaagttttcccgccgagtgctttcaattcagcagcaatagaagctttaacagcattccaacgtccttcatcaagaactcgatgtgggcaatacttgccagaccagtcttgatgctttttaactcgatctatgccccagccacgttctttaaggagttgtgcaataaacttaatagccaacgcttcagcttttttatagcgctctccgcctgatttagagtagcaaacttctacaccgatggaagtccggtttcctgaattcacacctgatccatcacccgtatgccatgcattacgatttgtaggaatcccttggacaacctctttatcatctacagcaaagtgaaaagaaacttcattattgttaccgatcatataactaacttcattttgcgctggtgcgtcgttgtatgtattgtgaaaagtgatgaatgaagcagataatgcatatggacatttgattgaatatttgtctggtgatactaacatttgtctcgcttgaatagccatattaaacatctctcctaaattaaatttgagcacaaaaaagagagaaggggacaaatccctatctctctttatctcacgtatgctcttgttatctctgtttttgaatgccgtaaattgaataaaatttatattttaactagaacataaccacctcctttaattttaagggttacttaattaagcagatggcaatgccgtaaccgagcttgtctgaatatggagttacaatctccatagccttccaagagtaaaacctgtcttctgattttgtgccgattccataattaccttcaattcgatctcccacagaaacagtactgtccactttcacataaacctgtccaagcaatcctactatattccattcaggacgttcttcacgagggacgtaatctattttttcaatccactcagggtttactttaggcagcttcttaacatcaccggtttctgggttgaccacatcttcatatatgtatccaccaaactcattctttaaatatctaccttgccagtgaatatcagctcctcctagaatagttcctgcagtttcagagattactccgtgtacatcttcaccttttctcgccgggcgaattttagctccttcaagagtgacaattgtccctgtcggaattgcttttccgtcaagactttcaaaatactcagcgtaatcactaaaggtggctccgccattcatctttcctgccgatgttatatccccattcatggagtttagcatccatttaatatttgctctggacggagtagcgccatatccgccaaccaccatatagcgatcattttcaccaagttttacacctccagaagcgtggatttcacgtgatacattttgcccctcgatatgagaatcattggagttgtaaacaccgctacgagatccatctacagagcttccgcctgatgagccgaaaacgttggttcttgttccctttgcaacgcatcctccggtagtagctccaactaaagtggcatctccaagtgcttgaggttcacccgatgaagctaatactgcactagtatttgttttagcatagccagaagtcgtagccccacgtagaccgcccttgaaattattcgggataaacgtgtaggtttttccggcaattttactgggagtagcgtattgttcacacatcgcagcgctaatattagcttgtgaattcgtgcagtaaacacctatcgaacctgctttgtttgatcccgtcatgttaacgttattgatattgactgagccaactttacttcccacagcaataccaactaaagcagattggttaatggttacattcgagatgtttacattatctgatttttgagctccaccgattacatagatatcgttactcgctgttgtaaatcccgaaacagtgatgttgcttaggttgatatttttgcttttatattgggtggtgatgattgcagtgtttttataatcataggttggatcaccaattgcgttgaagttcgaaacgttgacatttctataagcggaaatgactagtgcgcgaggatttaaaccttgataaaggtcactgaaaataggatgttgtgcagtgcagttaacgacattaatgtcaaatgcacttgtggagattttttcggaggctaggtggaagccaatatgtctaaagtcgaaagcgcggatatcattttcggaatagcagtttattaagtttacgtttcttgctgcaggtgctctattgtgagctttgacttcaaaacccctgcaattttttcggctgtaacagttcacaagccatacgtttttagagccatcatcaatttcaaaaccgtttgaatttgaagctcctttgctgtgtgcggatccattagcgtcataggcgtaacagttagtgaagaagatgtagtctgaatagtgagttgtgaagccatcatcaccatagttagttgcagtacaattttcaatccaaacatatttgctaccatttggctgataatgatctgctccatcagaagaagagttccaaacaggggagcttacatcaaaaccgtgtacacctggattacgagcattgacgtttctaacccgaacaaatttagagttaacaatccccacacagtttgcatttgttccatttgtaatggtgttgtcctttttgtctaaattccaatcgaggtctaagtcttcaattaagatatattcgtttccgtttgtgtagtcgctattggttaacacacaagatgttccggtagcagttgggtgaagcttgataatagatcctgatccaacaccgtaaagtctgacataagaagggatatgtaatccttgaaccatataaatacctgcgggtacaaaaacttctcgcttcccgctggcaaaggcagctttgaaagcttcagtgtcatcagtaacaccatcacccttagctccaaaatcctgaacattgacacttcgtctgataaactcatttaagactttatcaacaattgttgcaccagctgcagggatttttgaaatgtctccaatagtgtttgtgatatctgttaaaccagaatcgactgtgcttattacgtttttaatatccttagaagctttatcaaaagcctcttgaatatcgtctgcagtatatctaatattatttgattttaaccctatggcatcaatgggtatccattgctctgtttcttcgtccttatagcccattgtgtttacgggaattaaattgtcgctcaatatatactcctccttatccttttctaatccaaaccatgcttccgtcagggggttctacagatggttttatcctcatctttttgggagcattgttcgttctcaaccatactgatctgatgttgtaaggctctacatagctagaaacaatgttgaaaccatcatacttatctgacacgctaatatttatccagtcgaaaccatcccatcgatattcaatgcctgtttcttttacagtgacagtccaaccaatttgaggggaaggataagtgttcaataaatcctgataggtgtacacaaacggcaagtaaatcttcctagtattctcaactacatactcataatctgatgttgcttgtctgcaccaatttgttatttcaatacagcgcttggtgacacgttcacattcagcaatacgttcattgatacgaataatggcatcttcagcatcatcaattaagccttgaagcgtttcaatgaccatatttccttgtcgtttaatccaaattcttgaggcagggaagaaggatgcgccttctccttgatatgcaaaagtaagtgatttgccttcatttgaaccattgaaaaagacaactcccataaggtaatcaaccttaaagtagttgtcttctaattcaccatcttcaatttctcgccattctttactgtcaccactaacctcgactctgtactcacggttaggtacttctgtaagtaagactcgaccattgtaaacagttaaagtttcactatagcttaaataagggtcatcgattgaacccttccttttttgagaaagggtagggtcgttatagagctgaggaaaatccaaactaaattcaccgtcctttcttattgtgtaattgatttgagcaattcttctaagtgcgcgactctctcttctaaactctgcagtctgcccttagtaccacctaatgtttgtcctctaataatggattcagctttcttgtcaattacgttgtaaacagacttctcatctgaaattgcatatacagaatatccttgccaccaatcttgagcttgaaaaactctaacccatgcttcaaaccaattcgcctgaattgattcattgtattcccctaggtcaccgaatgcgttatggggctgttcaggagagttactgtaaggtgggatgccaagttcaccaaagaagatcggcttattccatttatcataaaatgctttgatttccttgaatatattttgtccgcgtccgtataacggtacgctataaatagcatcaattagctgatcgacagatggatttcgattatcagttaattcaaagtaagccgctattgcaataatatcgactagtccgaatagaggattattcagctttttgttgtaggcagcaatcgtttcgggagcccaatcagcggttacccaataatttgttcggtagagcatctttccactgaataaactcctaacgcttgtaataactgatttccacttttctgttgagtcttccatatgaactaggtttgaagcaatgtataaaccgtctaatttaaattgttcgcattttttagcgaagtcttgcaggatgttgttccatgctacgaaccattggtctagatcagaaggtgcccaatcggtttcagctatcgttccatttgcgatgaaggggtagggttctaaaataatgttgtacccgtcatttttgagtttagggatcatatcccacgcttcgttataagtgtaatccacaacagttggatttgagtctgaagcatccacagcattaataaggataggaatagtgattgtatttaagtttaaaacagttgagtcataactaacatcagcataatatttacgaccaaatgcagaaacatttccgcctttccatttcaggggattgaccaaaaggttattgagctcaatgttttggacacgactatcatagtcggagagtttagtgtcaacttgtgctgctgtggtttcaactaactcagcagttttctggtcactggaaacccatttttcgccgtcataagaggaaacaacaccggtaaccgtattagtccataaatcgtttgcttctggctcttcgggttcagttgaggagacagtgtatttcgagccattaagcttacctttgacttctacagtagaagaggggaggtaggggttttctgaggggaatttaggctgtacaatatcagatagtattcgaccactgctatcaatggacgtctctactgtgcgataggcttggactccaaatgtatagtgtttatttgaaacttgaccggttaatgttgcaattcgtttatcataactaactgataaatattgttcagctgacatctttgcaccaaaaagataggtatcatctgatgtgtcagagtagcaatggataagaaaaccatcgatattgtatttatcctcatcggagtctggaaaatcccattcaattgatacatctacagatccattatcatttacaacatgagttatagcagtcccgtcatttcggatagttgggtttgctacgggtgcagatatacgatcatttcgtgcattgtaattggtcagtagggtatcataatcaatctttttcttattgaattcagttgatgctttcttagcagtatacaatgagcgtgcaaagtcttgttctatcgtagtagctctttttccattcgagagtgttacttgtatactttgctgctcaaaatcaaaattcattcctgtaagtgttgctttgacatcagttctaaaatcgtcattaactaatctgattatatctcccaggtaaattctatcccaaaaatccttttctttgttgacagtgaataagttgacaatgtttgttctgatgtctaccggaggtgtatttttctccccaagttcctcaaggcctttttcatacagctctgtttcatcaaaaatgttgtcattagaccaatcatcttgacggataaaataagacaactttttcattagcttttcaccgagaaacttatccatagataaccgatcttttaacactgctatttcttcagttatcttggaaatctgattggcagtggtggatatttcagctttctttgatgtaacttcaagttgtttggcatctctttgcttgataaggtctttcgtgtcatctccagctttttttgctactgtgatcttatctaagatttgttgtaattcaattttttctagggtgaagagggtattctcctgtgttgtttttgttgcttccagatcttttttctgatttaaaaggaggtaaaaagaagagccttctttatttacaagttcattgtaatctaaaattgcatggcacaaatcatcatccatgtaatcactatgcttaattacatttctcttttcatcacgttcaaaagggtagaggaaataagagaaatcatccaagtaactttgtccagtaggattgactgaattaataacaattccatctttaccggtaatgtctaatcgtgttacaacttcatcaatatcaatggtatcttccatatcaatcatgaaccttttaggagagaattggacacctttatacttggacacagtttcttttttataaaatgatactgtgttgttcacagtatcaaatataggcacagcctcaaaagtttctccaatgttctttaaaaactcatatcgggtagaggtaacatcaaatgagcggcgtttttcattaaaagaggggtcaataaagtctacagtaaagcaagttcctttaagacaatctgtggcaacttccaacagatttttagagatgccttcatatgatttgattttgcttttatgaagaatgtagggaagtccttgagctctaacttgtattgtttgttcctcattttctgactttgtcaatccggttattacaaaccattcaactctgtttaagaactctgccttaatgagataccagccttttatgagttctgccacatggtttggcttcatcttgaaattatatcttgctttaagtgggatattaaaagttagatcgtggagttcatcaaaattcaaatttagagaggcgttagagaaatctactatattagcgattttctttttatttggttttgctaaagaaaccttgagatggcctggtttaaaatcgtaaatcaataaaacatccccttacaaatacttatatctgtatataaaccggatacaacattcgcccgttattttaactctgtttatcccccttgttaaaaaaacatactgttcattgacttgatcataacactcatacccagtaacactggaggtgatcagctctttattggcatctacattaataacttcttgatgtttaattgatgtgaattttagaggttctttataagctgtcaagttttcgactgtgatgtctccatcaccgatttttttgaattcaagagagagtgggatatctaaatcccctatatttttaatttctatattattagaacctgatgatatgtcataccaatgggtagttgtttctcgtccatacctataaggaaatactttcattgtcagcttcacatatccgtcattagagcagttgtgtaccaaatctgttgcattcactggcaaagcaaaataaatgatatctaaattactactgaatgaaagaggcttataatcatctacatttagccaacgtgcaactcttcgaatattttcttcatctaaatgatcttctatgtaaaagtttaaagggatttcatatggttcacgtttaacactgtctacatacggttcagaagctgatcgtgtatatgtttcatttactgttctattcgctacgaaggtctcttccaatagtccgccctctgtgtttacattcactgccccaatttcataagaggggatatcatcgaacatgaaatattgactttctctaatcataaaattccacccttaccaatcaaaaagcaagctgaagagcctgcattatacagactcttacatgcttccatttaattttataacttctttcttgatggtttcgagcattgttctggctccagtttccccaccagtaagtttatcaacattgaaaattattggtgtgttaattgttttatcaccattagaattaacggttgtggtagggggcaggttagcagtcttaacatttggtatcaaactattagataggctcgcttggttaatattcggaattattgatggaatagaagtaatccctttgttaatcaaagctgctaattttccaccttgcccccatttaggtgtttcattattcagatcgttatcagacagattgcgaacatactttacagtttcaagcatgttcttggtgtcagtcttattcagaataagctctttatcatgaagaatagcaagcttgccagcacctaaacctgttcctgtgtatcctcctgtttcaaatgaagatatttttttgcctgttgtattgcctttggtcacagtattaagggcattagaagcttctttaagcttatcgataaggttattagagatacttttaccaatggactccatattgctgttaatgaatttagagaattcattcagttgcttagcaatatcagtaatcttcccatccattagctttttctcaagttccttaaatccacgctcatcattgacgagatcatcatatttcttgttaattgaatcttcgtctttttgaagctgatcttgcaacgcttctttacgtttgctactttcacgatctttaagaaactcatctaaatctaactgttccttttgtaactgctcagttaattccttaacctttgacttaccaaattctgagtcatcaagagaatactgattaatttggtcagtgagtttttggatactctcttgcttctcttttaactgtctttgaaatttagcttcatcgtcagttttatcgatctcatcaatcaagtcttgtgttgctttttggtgcgcttttaattcaatatcacgcatcttttcgtacatctctttatagatggagacaacttcatcagcaagggatttgtacacatctttgattgatttctttgtgttgtaaagctccagattgtaatccttctgcttgtctttccagttctcgatttcttcagtaatttgtttctgaatatccgggaaccctttagcagctttcttttgtgcttccaactgttttatatacttcttcgcttcattctgttgctgctgaataagcttaatctgttggctataatatttaaccttgtctttatcttcctcggtcatggatattttgttgctaacatctttaagcttggattcagttttcttggttgatttctctataccgttaagcgtttcatcaactttggattggatgagctgtccctgaagttctcttacttcttcttggaaattgatgagatcaatcttagcttgttttaattcctcagcaagctgtgctctttgagcggcattcagagttttgtttgttttgatttctttttcaataaaagaaaccttctgactctgaatcttttgctgttcagttaaagcttttttctgatcgtttgtatacttacggaactctttactatcgctcagataatgactagcgagggctttgtctttagcgattcttacatcaaaatcaccaatgcgcttgtcatattcatcaagatgcgactgaacgatctcatattgaagctcttgtatctgatcgtttactgaattaatgtcaccttgaagggagaggaggtcggatttagcttgcgctattgcttgttgtcgttctgcttcagcttgagacgcatctgaaatagatgtaccgacaccttttaaatacttctcagggtcaattgtctttccgttttcctcaatttgaagatgaaggtgatttccagttgaattacccgtactgccaactttaccgatggtctggccagctttaacagtttgaccggctttaacagaaggggtatcaagcatatgcatatacttagcaacttttccatcatcctgctgaatgacaacccagttaccggcagttttactataaccagcaatttggactttaccactttgcaaagacttaattgcagtaccggcttttgcggcaaagtctgtccctttatgtggagttgatcggtaagcgccatcttgagcaccatacttagaacttattctaaacgcgctgttcttcgtgtagtagcttgcaatggaggaattggcagaagtcattgacttcgtgtaatttgacatgatcttctgaacataattctgtgtttctttgaagggagggacgccgccatatttaattacattaccaggccctgcgttataagcagcaagtgctttctcaacattgccaccaaatttgcttagttgttgggctagatatttcgtgccacccataatgctctgataaggatcataaacattgtttacgcctaagcttttagcagtggaaggcatcaactgcatcaaaccagcagctccggctccagagcgagctcttgcattgaatcctgattcttgttggattacagctgcaattagagctggatcaacaccgtatttgcttgcggcagaattaatgtagctggagtatttaccggagtaagacccaccaccagaagaaaaagaaccaccagaagatgaaccagaggaaagggaagaggtaactataccgtattgtgcaatgttccctgacttaatttgatccttgaggagtttggcttgctcctgcataagctttttcttttgttgaagagctttaatttctttctgcagggcatttcgataactttgggaatactttggatagtcgtttacttgcttattgtacttttcgatttcagcattaactttctccagagcttccttgtatttatcagccacgtacatggacgttttggtttcttcatttgctttctcttgctcgtctgtccatttttcaagggaagtacctgattctattaacgcttgtttgtttgtttcctgagtagatgtagcttcttcagatgctgagatgtaggatttaagagcagctctaacgctatccattgcagagatttggctgttagaaaatccaccaggttgcaacattttttcttcaatcttatgtaattctttcttcgcatcagctacattattgattgatttaacttcgagctgagacaattctgcctcggatatatcgagcttacgctctctccgaagctttctaaggctgtcaattcgtaaagaatcagcgtttaaggttttaatggcattattgacttcagttttcattagcttattgctatattgaaccatgtcattataggcatcgagcttaacttttcgctgacgaattacttcatctcggttaacctttataacaccattttcataacttattgctttggctaattctttatctttttggattagagcattagcttcattggcagaaatgctctttccttcagccatcttttctaaaagttcgtttaaaggagcaacttgttctttggtgttattaaaaatatccccgttaagaatgccttgaacagagtcaaactgcattgactctgacatgcctttgattacatctttaatctgactgatatcatttgcgtcaagcgcttctttgagcttttgaccaaaatcttcagcttcattacctgcttcagcaagagtttcccctaaatcaccaacttccgatttaacagaagaaatggccttatctccatctttaatgttcttttgtgccttatcaaaactcaacttaaagacatcaatagaagaactggattttgaataggtctccaaaagggtttgcagatcctttttcgcgctatcaaatgctttttcatcgtttgaattcaatgccgattgcattttctcttggagtttacccaatgcagaagagaatttatcgagatcatcaggattcaaatcatcttttaaagtgagtttacctacaatgtcattgatactcgtttttaaagtattgctgatatctatagaactgtatgcttgggcgattgagagaacactgtctctaacctttgcatttccacttgctatgtcagattgtgctttaagcataccttgcttcgctttatctgcagcgattttataatcttcatcatcagcaaggaagtcccattttggtctgcctttatcattataatcagcaatttgtttgtattgcttcaactcatctttagactttttaatttctttagaagcgtcctcgaaagttttcttggcgctgtctttagtttccgtctttttaagttcaaggtattctttagtgttctcaatagcttcttctaaagctttattactttttaaaattgcatttccttgagagtcataaccttgaattaaagcggggaatgtctgagccaattgctgagtaacttgaagatattcttgctcttcatctgatgaaagggttcttgaatctttggctttttgaagctctttatactgttttattagtttgtctgtggagtctttgttggttgtaattgcttcaacattggtctgttgactctgttcaaaatcatctttagctttttttgcatctgcgaaagatgaaactatgctttctaaagcccaacccaacgcagcaagcgcgcctccaaccactgtagaaactaaaagccctctaagagcagttttcaaaacccttgatgcaacagcagcacgggtcatacctgcttctaatccgatgctagctaaggtttcttgtctcattgcttttgagcctaatataagagttgtagctaaagttcgagtgtttttactgagtaacaatgtagcagtgctaatcgtcacaaaaagagggggaggaaaccaacagtgttaattattccagtggaggcttttaacaaagaacccagagcttgagtgaactcaatcaatccgtcactaataaaggcatccgatgaagctatagccaattcagtgaaattgttttgaagtttatttaaccttgcttgtaagctatctgcgtatttctgctgttcgctccaagcgctacctgcagaattagaagctgttgcggcggcattttgggcgatagagaagttgttcattaaggcattaaatcgagacaattgatggatatttgcaacgccaatagaggtgttttgtctttgagcatcagttaatgtgttccatttggctgctacctcattaatcaactcactcgcagattttgcttctccgcctgcagtctttacagaaattccgatttcatccaacgctttgattgcgcttcggttgttacctatccgggcaaaaatagttttaagtgagttaccaacaacgtttcctgattcacgagtggtacttgcgattgctgtagtataaccaatcagatcgtttaattcaacaccgaaagtcgaagcggtgcttcctgcttttcgaatagagttggccagatcaagagtagttacagcgtagttgttatccacttcatttagcttgtctgcaattgaaatagaatcattggctgcaatattgaagtttaacattgcggcagttaaagtattaactgtgtcatcaggagttaagtcagagacgttttgtagaacctgcgcggtttttgttagagttgacaattcactttcatcgaagcccatacgcccgaaatcaccggtcatttggagaatgtcagtgattttgtttgaaagtgtgtcacctaaatcgattgactcttgaagaagttcattgtacttgtaatcaggctcattcatcacacgtctgatgtttgtcattagagtatcaatttcaacagcctgagataccatttccttgagtccagatatagcgccgtagaacaaagaaccagagattaaatatgtagacatacttttgaaagcttgcgttagctccgcaccaaaagacgaggcttgactagctgctgcttgcgcatttgaagccaattccctgtattgcatgttcaagctttgcatttgagctctgatattgcttccgccggcacttacattaaggctattaactgcattgaggtactcttggatagcttgtctatttccagcgcccatcgtatcgccataacgcgtattaaggttttgtacgtttacctgtgcttggcgttgataaagctcaatagtttttcggagttcattatttttagccacagcagcagacttatcatcgagcattttaattctgttttgtaatgcttcaatttgttgagctgtttgagcagtgtttaatttccgcccaagggaagagagggtggtgtcagttacaattccttgctgtctaagtttttctaaatctatctttagttgttcaattgcttttcgttgctgatcgtaatttgttgtaacttttgatgacgtagcatttgtctttggatcagtcgtatatgttatatcatcgaagccattgcggttcttttgagttaccctcgtcgtttgtccttgagaattcttctgttctgttcttttctgtacctgacctagtttttcagtcgcttgagcaagcctgttaacttcttgggtttgttcacgtagtgattgattacgattgtcgatgaatttcttttcacgctgaatgatttcgccatttttcttatattgctgcgtcagcttttcaacagtgccatcggcatttctggtaaccgttgtggtttctttaattgtttgattgaaggatttgagatgtttttggtaagtgtcaactgcagaggagaattcgttgagagtctttaaagcagaggcatcaatattggtctttaaattaagggaattaagctttttctctaaagatttaatttgctgatttaactgttcgacagtctttgaggaggtatcagcttttggggtcagtattatttttaaatcttgactcaaaaataagtcacatcctttcaagtggggctaatcagagcaaataaaaaagccactcaaattattgagcgactgtacttgttttcttgataattacatccatgacaccttgccaatactcagcgttttttaaagcttgctgtatgatattcccatcttttttataaccttgaggctcatatccatcatcctcgcgagaagggaggaagtggatatagtgtataggatttttgaggttttcgactgtaattttaagcgtaattgacttcaccatttctgtttgagtagaggaggctgacaaaccaccaattgttgcaccaattccgccgcctaataatcctccagcaataatccccgatttggcaaccttcgaaatcacctggtcatccagtgagatttcagattgaataatttgggcaaaagggacaacatactcgtttatttcttctccatttagctgatataccttaaggatagatttatcttcattgtaagcaattttagttttataagtgctaaagaaattatcagggttaaattcgctatcataggtctttagtgtttcagcattttttctaatcttttcagcaacagttgcattttttattctgtaaggttcgagcgctaaataagccaaaccgccaattatcagaaaaacccccaaaggtctccagccatccattaaacagaagaaaaggctgaataaaaaatagccaccataagccataatcttatagcccatccaaccaccaccagtattattttcctacattatatcatgatttccaaaagtgtagaactagcaaaggggagggtcactttcctttttcggacttaatctgctcaagtaattctttaaaatatgtagcagtaataacaatgtccctatcctttcgtacaacaaaaagtaggagaaggcaaatcgatgttgcgattagaatataccaaagcaaattaaaactaaacataattctgagagatagtaaacatgttcctatgagcacacttccaactgtccacattttcgtatgatcgaaggacgcttcaattcgactcatacgggaaatagctaaaattaaatctgatgaattgagcgattttaggatttgaaatttgcgcttttgttctgtgtagagctcaccagagtgcgggaattctttttgtatgtatttgatcaggtcgcgactattcatctgtactaaattgtgtttaagtattgtcttattcatatttttcacctctccatattatcgtcaaatatggaaataagtttaaggttttatccataagcaaaacccttcggtagaaggatcttgattctgcataaaagagggatttcatttacacttcaaattttgctttcttgtcttgaatagcatctttgtttacttctagatagtgattctttgttacgtcagtgcctttatggttcaataattgagacacgtcctctagactcatgccactgtgatacagaaggttactaccactgtgccttaaatcatgacagtgtaattcaggaatatcaattatttctccgattctctttatccaatatccttgtaaagttccggtttcagctttcttccatatgcctccgtactttgttatgaaaaggtattcgcattcaattccgttttcggatctgtactccagccattccttaacaagatcaatagctctttgagaagggaagagggtgactttatatccttctttttcaatgacatcttccacccgaagtctttcaaagtcaatttgttcaaccttaacgttgcttatggcattagctctggccatcgttgagagaccgaattcaaagaagagctctaactgaatattttccttctttttaagtccttttctgatttcttcgacttgttcttttgttaggaaggtctgtttaatttgaagtttttcaccagttccagctttaggcctgtctaagaagtcaacgggattctctttaatcttacgttttttccttaaaaataaaaagaatgagctaatactactcattcgtctctgaattcttcgttcattattgcctagaatactggtgcaaaatgcaacaaagtcttcaattaaatcaaccatatcatcaggatcttctttaataatatccacaatgtgctgattattgtaattctctaaaatgtataccagccattgattgaaatctgattgatatcccactttactggattccgaaaggttcatgtttttaaagacaaaatactttcggattaattccgcatttttggggttaattttgttgaccttttcttttgttgcatatgctatcttttttctggccattaatacaccaccgttattctgttttaataccacttgtatttaaatcttttatcatagcagcaactaatcgtccatcttttaaggattcagcagtattcttcatgactgggcgaggttttccgtaaccatagccgtatttatctggatacgtgtacccttgaccagtctcaacaaccgtagcaacatccttgccgttgtcttcacggttgttgtctaatgaaattccgttatattcgttttgaatgacaaaggagtccttcaaaagagaagtacgttcatatacaagaggatcgtatgtgtcatatacatcagattgtacatgctcttgacccgttttaatcatcgtattttttgtgctggattgtttttgaacggcttgctttgcggcaaattcaattaatgctgctatttcttttatgttcttggccattattcagcctcttgttcattctcaatctcttcgaccttattaaggatgagatcatttatttcttcaggagatatgtttgaaagtttgtctaaattctcttgcatcatctttgttgcttctccaaatttcttcatgctttcttcagggaagctactaataatcaatgggaaaaattcagagtccacaagcttaacaaaccacttaactttgtttttgatatcacttggaatacccaagtctgtaaattctttaattagtgaaaagaatccccattgaacaggatttatgcttttaaagtcaatgtttttttcttgagcattttgtgggtcagtaattaattcagtaagcattttggttaagcgggtaggggagaagtaagggtaaataaaaacatgaacgtcctcagtaagttgtactcgttctttcttgtcatatttacttacactttcttcaatcaacccaagatttaattttttcgatgccatctcatttcctccttatatatcctctgcacacattaaaaaagacacctcaataggggagaggtgtctaaataaaacttgtattttattctgtgtctgcttcttcgtagtcttcgccggtgatttctttgtactcttctaaagtgactaaaccattctttactcctaattggagctcttcttttgtcacatcgttgaattcctggtaagcttctttgacttgatcgacggttgcccattttcgactcagggcattaacccaataattgtatgtagttattttatgaacctccctttagatcagcaatatcttttaacattgtgtttattgttttgttgacttgaagcaagcttaggcggagttgggatagggtctgtcctattatttcaaaatcgttaggttcagggatacttggtttaacgctatccttgtattcttcagttgctgattcaatccatttatttttcttgggatcatatttgggcaagattattgtggggtctgggacagcagttgtactatttggaggaagagcatcgccttcaatgaagtcttctccagcgtacataaagttctcatcataataaagaacatgcataatattttcacctactaccataaaggaattcctatattaaatgaaactctggaaacactgttaatgtcattagcatacaatccatcaaaacgtaaatctccatctgttgtgaaggcaaatctcgctgttccatatgatccaattgtgggtactacaaaatccactagctgtgttggcttggttgagaatttagcaactgcagttccaatggccggcaatgttccgaaagatcctcttagccataacacattgtttacacttgagaatttgaaagggtaagtggagtattgtgtagctccattgataagtgtaactgggttccaagaacctgacgtgccactccatctggctttgtcatctaaagtaacgtgaatatcagtttttgcttcgtgggcatcggtgtaagctttcgccgagctgagtgcggtagtagctcttgcttgtgctccgtcagtcgtctcatgtgtttgccaggaagtccatgttgaatcgctctttctaaaacggaaataagtatgtgttccgtaatatgcttctaatgcgaattgtgcaatcgtagttccatagttcatgacagctaaatagacattggataagttggcaggggagtgaagcccctgatttgcgattaaataaaacccagtgttaatcaaatcattgtactccgttttttcggagctacctttgtagaatactttcccatcatcgtcagtgagtttgaaaagttgagcagcgtcccatttttctcgatcagacttgctgatatgaacattagtgtcattcagatgattatcaaagtcacttttagtagcttgttttacattgtctacattcccaagcccaacctgttcagcagtaaccttgtgtgggtttgattgatcgttagtatgttcagctaaaaaagactttgacctttcatcggagctgttccaataactgcgctcgtcctttgtgatatgtcgatccaggtctgcatcatgagcgtcaaaatcaattttcgctgcttgctgtacattatcaaccttagataagccaacttggcttttagtaactgaatggggatttttcttgtcgtcaagatgtccatcaaaagccacctttgtggcttgctcttcattaagtacatttggtaatccgacttgctctttagttacatggtgcgggttttctatgttctgagtatgcgactttaattctgaattttgcttttccatgaactcatcgaccttatcggataaacgtttttcatgatcagacatgtgagattcagttctgaaaaattgatctttaaggttattgatttgtatattgttttgtttgagctgacctacaaatttactgctgctcattaactcaccgcaattcctttaaccgtaacatctccatttacggaaatgacctcaaccatgaatttgaaaagccccgcaatatcgaaatcccagttttcatttgtattcaatgtacccgtacctaattgaaaatcagttttgtttgttccagcaatttctgtcttttcgccattttcatctacagcaaagaattttatttctcttgaagttgaggaaccagagatcttaacagtaatatcccgataatgtgatactacaaattcttcaccttcagacggggcagttgttgcttcgtggaatgtaaaggttgctttatctggaatggtttttaaaatattttcatcggtttctgtcaacaactccacctcctaaatctgtttaaaaactgacttttatttaaaaaggagaggggaagaatcccctcaaattatttagcttcaaatactcttacgtctctgtcagtaccgtcattgatcacatagacataaagtgttttaccagcggcgacaggaactgaaaaaggtttgtcaccggctgttaatgggatacctgtatcagcagttacagttgagttcccaatgtaaatcgtgccttctgcaggtgggtaaatagtaagtgctgttctgtcagtgatacctgcggtaactttttgagctgttgaagtaacagtgaatttatccgttttaaaagaggagaaaccaggatctctttcattcaaggtcacggaaggggattgtacttggatgcctttgatagcatccaaaccagcttgaggaaagtcaacttgtagtggtttttcttgtgattttagatgaatatcggtgattggtttaccagttccatcgtctctagctgaagtgtaaatgtctccgtctttgtttaaaagtgccaagatatcaagctcctaacgttattttgtttcttgcgttgttccaatgtctacactgctattcgatgtcgcatcttcttgttcagttttaattccttttgtcccatcagggttacgcttaacacgggcaaaagtaccgatcttgccattatcatcagctaatgctcggtatccaatttcaggtgtgtaggcttgtccagcctctaaggacatgtctgcttcaccagagaaattaactttaggtaactggatataaaggtcactgtaaatttttgatgtctttggatcgtactcaagtgtgtggatttcgaagtaatagttctcggagaatttttcaccactaatttcaactgtttctgcatcaacttcaatttgatagtgagctgttacagcgttccctttagcagcaaacgtttcaggaacagtaattgttttgtctgaaacattaaattcttgttgatctccgtcttcatttgtaagtgagactttggataaaggagtatacgcgattttgattgtgccggtatcacttacagtaagactttcatcttcccatacagaaatcgtctcgttttcaatttttacaccttgctgcattgccataaaatcaagatcaaagaaagcattttttacgttgcctgaaacctctttgcttgagttgatgacatacaggtctctatttccccatccgccttttaaaaagtcttgttggacttgttgggagaactgagtcatttgtgttacagaagatgcaacaaccttgtggtcactaagtcttttggttagcaccttgccaacttcatggataactgtttgttttgccaagtgttttcctcctaatttaaaatgaaaaagagactgtgaatcagtctccgaataattgctctaaatttttagcatctgctgtactgaggtggtgtttttcttctctatacatatcaacatgactattccagtcaccgattttcacatcagttgatacagtggcaaataacgcagaagtgttataattcattatttcacccattctgtaatatgacaggtacaattgataaattgtcatatcggctacctcttgatatgtgtatccattaaatgcagccacacagctagcgatgtcctttaaatcattttgagaattttggagttttaattgattattcaaatcatgaaactcctgtaattcatcattctcaacaattttctcttcagtcaggcaatgcatctctaatatcaattttctaacattgttaaatgctctctgatcaataagatgtagtgattccttgtccacaaatactttgctaaacactttaaaataagcctggttaaattcgggtaagtaatcatgaacaattttgaagagactattcttcttcaattcgataattaaatcatttaatgaaccgtcattgttgatttttgaaaagtttctgatgatttccttcttgctcattttcatcatatttagctcgcttatgtactctgggtaatctcttaagtggataaagtttattgcaccgacttcagtattaataggccttcctaaaaagaaaaaatcctttaacacattcatttacttgctccgaaagtgaatatcaatttgtatcccaagtacccttcaggcgcatttgatatgagcaaccttgtatatttaacatttttaccgatgccagcaaaattttgattgaagagcatgtcacaaatacgatcagtaattttcaggttcctgaattcggtctcctcataagtgttaatgtgtgtataaacatcaatcatcaagtcttgatctagcagcatcacactttgggttgagggtttagggattccattgccgagataaacacaaagtctgcatattggttgatcggttaaatcatcagttttgggagcacgtttaattattgagcttaatattgatggggaatcatcaactggatcataataattttccaacgtctgaacatcagggagagaagaggagagagggtcatctttataatataaaagacgattcaattctgtatcattcataatagttctaaatacagttgtcatatgttcaaccatcatactcaatcgctatcacctccaactttctttttggctataagtctaattgttccggtgtctccatagaccttggaatagtctatatcatcaacacggaattcctcaccataaaaagaaagaaaaagacccttctttaatttttcatgttttaaaaaagggatggtgacatgtgcttgcccttcaggaatgtttatagccaattctgatccaattgttgaggttgttcgttctaatacacacgggatgtcaaccttctcaccaggcactttaatctttatcggtctccctgtaacttcatcaatctttccagaatcaataagtttgtcagaagatgttagactgattgatgaattgcaaagccgcatagtagcactgtcattcattttgttatcagtggggcgcgcattaactaaccagtaactaccgtcatacaaaatcaagtctccacgatttaataagcctaaaactgtaaggactttttttgtttcgctgtcctgagtggtttgaattatcacctgttctggcttaccattcaattcaatgtcgtaagtttcaggtgaatttgctaagatttctttgaaaatttcatacttgtttgaattaaactcttcgttttcccagccactcaaataatttgaagaagaggttagataccaatctatagacatctaatcacctcaatcaaagttattcactttcagtttgctcatttttttttcaatctcatcgacaagatcttcataggatctattaacctgagctttagtattagataaacctgtcaattgaacatctcttcctacaacgttgtttaattttaaggctctgtctcgatatctgaaagagaatcctttgtacataagcattcctaaaacttgaatttgtgatgaagtaaggggatatttaaatgtattggacttttcatcataaccaagttctgtcagttcggtttcgtattcaccaactgcgttaatgaaaaactgctgttcaaggccatcagggagaatttcatttgattgaaacattgagtggaaaacgttaattattttttcataaggagtcaagatttaacctcccttatgattgagtatcaaatttaaacccagtgtattcttcaatgaacttgatcttagcgtaatcattaatcttttcttttttagctacatcaaacagctgagctttttcagactcaagtaagatttccttttgaacattttcttcgaaggctttttgggttttgtatcccaagatttgtttaattcgttctacagtaacaatttcttgtttgtcgtctttatcttcggtctcaaaacctaagtgcacacgggtttctttgtcatcaatatagattttggcatgagtaccttgaccgtcagttccagtaaatagtgaggtattgtcatagacttgggattgcacttccccagctgtgatctgtctaattccattggccggcaatctgaagtcaccgtgagagtcaatctttcggaaatataaatcccatggacataaatttttaattgtaatctttttatctaaattaaaagacatgtaatccctccaaaaataaaaggagggacacagccctcctaaattttaaattgtttaaatttgtggtaattcatattttgtgtctctgatgagaccaatttgatgttcttgtcctttggctacaccagctccaatttccatatcaaaacgagtgatctcagttccagtgataatgtcgttaccattcatcgatgtgagtccgcctttttggaaaacttgaagaggagactttttaccttgaggaatgaagaagagaagtccttcaggaagatatgttttgaagttatcgccggctttatttaattcagttagattataagcattaggtaattctacaacagaagaacctttataagtgttaagtaatcctgttcttcggatttcatccataacagactgagggagtttagtgcttgaagcatctccggttacagcctggaaccctgcaaagtcatttaactgagaaacaacagaaaagtcaccaacaatagaaggttgtccaaatcggcgaatctttgtgataatatcgtctacagatgatttggtgataccttcagtttcagcaaagtatttaacacctgttgcatttttaattgcattgaacatttcatttactacatagtacatcgctttgttcatcatatctgtttgaacttgctccatgccttctgctactttatcgaggtttccactttgaatctcacgatagttaacagcatagccagaagaaatggtttgagttccaatcgggtattcgctccaagttgtagtagcgaacggtacgtcaccacgggaagcttggaattggcttcggatggattcatgcgcgtatgatgtcatcattggttgctgatcatagccgatagttctaaatgtgcccataaaatcaaatagcttaattgctgaaataagcttaggctcaatggcataacgcacaattgtgttgatctcggctttagctacagggttgcccataagagctttggaagctagttccttcacatgggtcatagcagcattggcttttgctccaaacttggaaagatcttgacctgttgcagctgcagaaaagatttctacaataggggacttagcattcaatttagcatttgcataatggtttgagtctttttgaacattgtttaattcaactgtaaacattaataattacctccagaatataattaagcctgtactgttaggtacaaaccttttccgccaaatgtatttttctctaagacttttagagatactttaaactctgcaacgtcatctccagctttaacccatttacctgatttgtctgcagcaggaaccaatacgtcatctttaacaagcgcatcataatcaactactacgtctgagctaagttcaattggcagtccttttaagtcagctaaattaaaagcaaggacatattcaccttttagaactttgaagtcttctttattgcgaatttcaggtttatcaataatgtttccaacaacatacacatcaccttttgcagttgaagatgcacctggagggaatgcgttaccagaagaatcgttagggattacgactagaccagggactaaatcgacactagccttgcaacgtggattatttcgtacttgtttataagcaccaattgttccgaatttgaacattgagtattcctcctaaattttataaaagtgttattttatcttaataaagatcatcaatagtcactgaactttgttgcccagaatcacgaacttctgaataaatatcgaaatttgtgctattagtctcagaggcttgcttctttgagcgttcagtgatgaaggatcgagcgattgctgagttgatttcagaaataatttcgtttttaagctcgacagaaggagacttagagaacatttcaattttctcttttgcgacatccttttcttcaggagaatattcctttaaagcttggttaagctctccttgcatcttttcggctaccgccttgtttttgaattcctttagggaattaagctcttcatctgccttggctttttcatccttagctttttgcgcttctttttcttttgcatcagccttagctttttcatcctttgcagctttaacagcggcattcagttcttcagttttttgctttaagtcctcagtaagtttctcaactttttgatttaattctccaatttctttattcttattatcaagtttgttgtttaactcaaggactacttcttcttgagattttggcattaaattatcctccttttttttactgtttaattcaagcaaaatggcagcgtcgtctgcagggtcaatacctaaaatggcatcacctgtaaagtcaaatttcataggtatacgtccttgctctttccagccaccttcatattcaattgcatctgaatcttctacagctgctatctcaaccgaggtctcagggaaatcgccatcaaacatttttgattttaaccattgaacaaatttaggatagcgctggttgtataggaagccttcagctattaacactctttttggctcaccattaacatcaatagtgtcaatgtaagcattggtagtcgtaccaaccactgcgctgttttcaaagagaggggtgccgtccttgacttctgttaaaccgtgtccgaatggctcactgttttcatcatccaagaattctgcgcaaattggcattaacttgattgattcaaggttagcgtttatgtatttctccagccaggtaataccgttcttgttgaactgagtattgttttcatggatttcgagaacgacccacttgatgtatgtttgaccactggtttttttctgattgttaatttctaaaatcgtgcttttcaaatactaatcacctcctctcaagagccagaaggcgttccgttactgttatttgtcttcgatttaatcgtgttttcatttttcggatcatcgatctcaggtgcgccggctgacttatcgttattcttactcattgtgaaagaggtcgcatgaacagggaacttttcatcaaaaccttcgtctttttcatattccattagggataagtaagcatcaggattccatccagtagcggctatccaagcaataaggcttcctcgaccacttgtataaaggtctttcatgttttggactttttctttcctgttaacgtgggtaagagggaggtagtaaacctcaatataagagcgaggatctttgatgatattggcgtttatcaccttgttaaactcactttgaatttgttctaaccaggagaatatttgggaagaaaccatctcgatattggtttgttgagaagaatagttaccgtcttgaccattgagagcagatcctgcaaatcctaaatttgtagtgattcgtttaatgagctcgtcttcacctttaaccttcaagaaatctacattagtttccaacttgtctaattttgttccagaggccaaagagaagaacttaacacctttaacgcttcctttagcaactaacgctttttttatattctcatgctgctgctcctgttgcttttgagataaggctgatttgcctttttgatcaccttcagggaaagtctgataaattaaagtgctgttgagctcatctaaaatgtttcgtttagtgtcaacaaagtattcatcataaaccatatcaataaatgcggataaaccgattgggcgtccccattgatcttcaatgtcgctacttcctttaacagcaatagtcttattgttatcaagaactaaccattttcgattttggtctttcttataacccctatagccttgtctgatttcttctggccatcgtctaagcttgagcgatctcccgttacttgtgaacttatcaaaataggagacatcaaaagctaactgataagaggaatttttccttccgataattttgcaataatcgagaggaagagggaggacggaacaattaaagtcgtcaatagcatttgattcagttattgatccgatctcattgtcacttagagtggtggggaaagaatcatccactacagaatcaaaataataaaagccagtgccatatttgctgagttttcctaatgcatccctgacagcacttttgtcgccgatttttcttaaagccagattgaacttttgtttgttcgatttgaaattagctactttacttgatcccaaaataactctgtctaaagtagggagggctaccatgtagtcaataacgtttctatacacaccatttgcgttataaagcaatttagaggcatccctaatctgtttattgtagacgttgtggtctttcagccatgatttaactttgtcgtaagaaataccgttaaataaatcattaaagaacaatgaatcaagcggcgctaaatttgtattaaactcatatgatgactgtggttcagatgtagtcattattcacctcctcaatttctaattaaaaaagaatccaaatgaatactcatcatcggattcttccttttctaaaaataaagctatgtaatacagcgcataagcaattgcactgtacctatccttatcaattctttttacaacttgctcaacagtgaaagaattctgtgtctttttaattctgaggtttgctacttcgtcaataaacaattgagtttgaatacatgctgcttcaatcattacatcatcagatatgcttttttggttcttgatgtcatcataggatttaagcaacttcaattttccggactcaacataatccaggaattgagtaataatgtcttggttaataccttgggattttaggttgtaaacgatttccggcgaatttgggacatctggcttttgatcagtgtttattgtggcccagcatccaagttcttcattggtctccggatccgtaacatcctctaataaccggtcgattaaaccgccaccgactccgtttccatcgacaataacagctttaactcttgagagagaagtatcttgatttcctccatagtttttgaaaactctttttaccatgattgattgttctttaaaactcaatccgtttggtggctctataatattgaccacttgaacttgcctaatgaggttattgctgtttctgattatcttcaaaacaacgatagctgttttattgtttgattcagccgcagagcgggctacgtctaccccgattacatattcatgtagcaagaagttcttatttttatctctaggacaagaaagttcagggtgggtaattgtccgagctttgatcaatttactgatattaatcaatgcgccgtcacttgcaccaatccagtcacaaaggtaattctgacggaagcgagttacattcccttgtcgcgctttattaataacagacattttttgacgaccaaagtgaataggaatgcgccaatctgatccgaatacaaaggatcctttaagatcaccagtttccttaaccatcgtaaggattttttcgtactcatctgagtttttatatcctgatgtggagaaccggttaatctgcccatttaattcagcaggatctatttcgccagtcatggttgtacgagggatgttaaaaatcggctcgatagcatcatcgtataaatctttatcaatcaaggcagattcctctaaggagccacgtcttctacgtaaacccttagatgattgggcgtttgccaggttatcgatgatcgccccgttttgaaattcaactcgaccactgtcttttgaaaagttttcactcttgatttcatctttaatggaagggtaaaaccttaaaatttcctcgtgcttttctttccaaattttcaccgctgattcctttgtagaagcggtaatggctaacgttacattaggaaagcaaatagctgtatggtatgcaaccatgatctgggtcaatgtattatgactaactaatccattacttacaaatgagttggttaaaggcatatatagatcataaacgtagttctcagagtcttctgtttcaattactttagtgtaatagtaattagaatcataaagctctactaaatggttgaattcatcgctatctttattatcaaaacgctcattttcacttaataatagtgataatttttcgtaagtaagatcattagatcctttaagaacatgataaaatttatctcttgttttacctttaggataaattgctataatgttatcttgctgataagggatgacatctttatttggattgcgatttttgttacatattgatataagtttttcttgctttcttgaacaactaaatccaatttcccgtaaaaaaagatcaatattctttgtagaaatattgatcttataatgataagtattaaattttttatttagatatttttttctgaaagaaataataccaaagtttaaaagtaacatttgaacttgtttactcattttttctgatgcagtgcaaaattgtacgcttttatttgtcacacatccatcggtatcaaatagaccttgtattgtttttgcaacaatatttttaggtgctttaagtataattttaggtatttccttaccaaaagcatctttttcttccagtcctaactgtctgaagaattctcgaatgagcttaccaaatacgataaaattaattctatctttttgcttaactgcaatacctaatacgttgttaaaataatctatataattatttaatatatcttcgtcttcatttgtaaaaagtattgaattgtttctagtcaagcaaccatcaccaagaagataaccaataattaatgctaattgttcatcaatgtattctggaatattgaatttgtttctttctacttgccatctgccttgattgctaaatccatttaagaaatcatcaaagcttacatttagctttgtttcacttccaaatacattattgtttcttgaaataggtaataaatctccaactttaatttcactagaatttttgtatcttagttttccatcttcacacattactaatactgggtgatttaaacttgcttccaagtcatagccatcttgagttttgattttcttcgttttcttgaatccgcttgatatgccggccatagaagtttccattagaccatatctgtttttcattgagattttatgtattgtttcaacttcagactcttttttttcgtaattgaatagttcgccaatttctactaatccattttcagtaaataaaactgtgtctcctgcaacacattttgatccgccacgtggaatacagaagtagttctgagggaagcgactgagtgttctcatcataactctttggtataaatccagctcaattccgccgacttcgggtttcaacatatcgtaaaaaatgtctggataaaaacgaataaatgaggtgaactcagcccatttggagatattcttgccaatgaagtttgaattgtcatctggattcagaggggtttcaaaagctgcgtcgtaaatatctgttctgttttttgtgtgcttcttgtttttcgaggtgaagtttttataactagccattaatcttcatcacctgtgtcataaagaggttctttgtacacattctccaagtctctgaaaacattgttgcgagcactctttagtttatcaatttcttcaggcgacaatccttttgatttgaagtcttcttcaagcatttcatcataaaaatggtaaatgtctttgtaatcgactttttccttatcttcgagccttctgtaataatttataatcgcccaaatgattagatcagcgtcatcatatggttgggctgctaaacgaggaagaaggggataatgcccaattctgtttcaacggcttcaaataattgagaaagtacatcgactccaccactgatatcgctcttacttaactgagatacattaatttttgcatctgtagctgcctttgaagctaatgaaccccattctttagcttcttttacatcacctttagcagttgctaattcctcttttacacggaaacgaatatatgaaagcaagccttcagtatgaagtgtggttttttctccgtaatttcgaataagtttattgtattttctttcaaactgacggtactcatcgggggtgtaaccaataccccatttatcaatcaggtcatctggaatttcagattggctaacaccagaattgtttgtaggcgtagattcctctataagtggcttctctggttgtctttcaaaaacactgtctttataaccagtaccgttaaactgcttcaatgaattagccattgtcatataagcactaaatgtatctgtttttctcttttcagcttgttcccaatacaacggatcaaatttaacatcgatctgctgtaagactgtatatattgactcaatattgctgtaatcaatgtttttcttcaagcaagtcttgcaaatagggacttttcctgttttctcatacagactacttcgtgaattatagaaccccgactctttgtccttttctttttgacaagcagcacagatcaatttttccttttctttagcttttcttggcattggttcacctccaaaattttggttcaaaaacacgttttataaaacgcccagcaatagagagggagtcgagatttctcaaatcatcactggacgttctaaaaaagtattttatttataagttaaggcaccgttttcggacaaaacaaccttggttccttttaaggtatcagcaagagcatccagcaaaccttttccaataccgtttgcatcaattattaacttactcggtcgtttgtctataataatggcttttatttgactagcctgatgtttaaacgttccatgctccactttcttagagatgtcctcaatacgggaattatttaaatcaataattaaaaaggttgtttcttctcttctaggattaattacagcaattctttcaggattgtagcccgtgctcaatgtgtagctagttccgtttaagggtttagtagagaatttgacgtctcggttcaattgttcacttttagtgtttttctcaaatcccaggcttttatgcagacttgtcagggcgtcttttaattccctgttacacagataaccactatcattaatttcttttagcagctttacatattcccaaagaattttagtttcttctttcaatcttcctcatcctcatctttataaaattaaagttttatattaattaacaatcaaatttactagagtgctcttactttcaggggacaggttgtcccactgcactgctaatatttctataaaatcgtttgcagacataggatcattccttttacttttcatttttaaagcgaattatgtatgtagcctcaatacctgcatcatcaaaaaccataaatttttgagaaggttttgtgccaaaccgaccttgcatagcataatcatccgcaccaacaagcgctccgtttactacaacggttgtgctgccgtactctttttcataattgtgatgaatatgaccaccgaatatgtaagaagggatgtagccaagtaattgaggtaatcgtgttacacactgatcaacacgatcgtagtgtccgtgcacaaacacgacttcctgattgttgattttagcggggatgaatccgtcttgctcaggttcaatggagatgttctctatgttctttaatctggcttcaagataccaattaatgaggtattcaaagttttctttaatccctacatcatttttagaaggggagaggcgaccgtgattacctgccacgttgtagaacttaacctcttgaaactcacttgccaacatcgctaaaacctcggcaagcgtttctgatacatatttaatttgttctacagcatcttcattggcctgaactcttgtagacacatgaataagacctccgattaaatcaccgagatttgctacatgcagtgtggaaacatgattctgcttaccatactcaatcactttgttggtgagatgttctacacgttcattaaagatttctttattgaatttatttatgcggttgtcgatttccattccgaagtgccaatcactgaatagagcgagtccatgtttttcagcaatagcaggtgatgggaaggtgaagcgaaggggtctttttgactctaaagatgcaatagcttgtacgacatcatctttaatttgttcaaaccgtgcttgattggcaatgaatttccgatattctcttttttgatctcgtgctttgattgtttgtttttcggattcaatgcgaatttcttcatgtttttgttgaacttctttgttcatattctttgagataaagtaatcgtgccagcgctcaaattgtttaaagtctttacgccatttgctttcatcatagttggttccctgatccttgtttaaaagggcagcaattgtttttgtgtcaatgtgataagtgtctttgtttttgaaaagtctgatatgataatcagtaaatgattcgtctttttctcgttgtaaaacagtatctaaaatagctgtcattcagtcaccacctactcattgatttgtggaagttcgtcttcttcggtaatagaaattttcactttccgaccgtcaaatgattttaaaatagaattcagatcataacgctcgatgtctgtttttgtttcttcttcaataatcccatcaatgtaagtatagttaccttttaaatttactgtatgaactttcttagccaaattaaattcctccaatatttgttttatttacgtacaataagctccttcggaagcccgatgatccgaaacatcggtaacgtccgaaaaggggatataaggagatgaaaatatgagtcggataggcgttggggaaacgcccgaaggagattattgaaaacttgcgtaccagaagtctcgtaaggacattccggctgatcagtaaagtaaaacgcaagcacaaaaagacctccgccgtagggtgcggaagcctcgttctgattgcgtctatacaccgagatcaggacgcatcccttactcgctcgcttctctgccggacaatgccggatgtatagttggcgctgttggcttttagcaagctgcgatagcttgacacgccgccttggctattcgtttattatgcggacgaggatttgcacctcgcatggacgaatttcaacaaccgttagccaaaccgactattaagtagcccgttgtctacctcacagcatcgtccttatgttcgtctaagcgtctacctattccgccaccgcatcgttaggttttaagacactcgattctaagattacctgcgcttgattatacgcttcctcataatcgccgctcttaaactcgtctaatttttcccggaattctctatgacgttttaagtaagcgtctttgtcgaatttaatacgtatcggcattttcgtcctcccttgaaaaatatacgaaattagcgtttttttacataatattcattaactcacgtaggtacgcaaaatcgacagggaatacgctgattacgggttcatcgttcgaaatctttgtaagtcgaaaataacaaaagacgccaaataacgtcttcagaaactccttgtacatcatggtacatgagcataaaaggctggttatcgctgtgcgaaatccagctggctccttctacacctggcagatgagctatgataacaaaaatacacgctttaagggacgtgttaaaattcctattacctttacatcttatatatcaagtttttatgttgcttgccaactgctcagtagagtctgagagccaagggaaaaataatttgagaaggaagaccctaataagccttctcaatggcattttaaatgctcttgtcgggttacacgccttattgagaaacaaagcgtctcaaacgctcgccatttattttgcacagttttctctgacccgtgtaaggaggtatgtgcatgggaaaggtaagtctccatacagaacattgaaggagatgaagtgaaataaagtgaacgtgttgctaagtgaaattgaaaaggcaagaccgaaaataatccttttctgtgaaatgggagcggtgatcaatcgcccaaaaaccatctcacttattttgcgaggggatgtaattacaaaaagcctcgctaacccggaaaaatttttatgtgaccgcataataagcatcaaagcttacaagggcattatttaaagggaagggagacgcatctaccttacctaagtgcaagccgaagcaatacaccgcaattaatattcaggctatatgccacccataataagaccctgatgggattcagtcgcaatttgcaataatgcgttaagtcttaccgacatttttagcccgataatagccatttacctgtctctttttagatacagacatgcgagttaacctcgaaccctcataagtgaccattatccgactaactacaatgaccagttgtagctgtaaagtcgaatttaatgcttttgttcgtatgaaagtgagaatagcaatgtttagaaaaagcttaatccacgatggggcaataccccgctaatatccacttatccaaaaccctggcatccaagacctcaaacaaatgaatattagcggagaactgatatcccacatatcagtaaacagcttattattgacgacacccccatgccatcaataaaagaactctaattaataaacctggagatgaatacatgaaaaaagaggggaggtcgacaatttcctccataacttctaactctgccacttttaggagcataagctctatgtgacaaaggcgtgcaggaagcctttcctgtcgtcctcagtaaattttattaagctttcactgcgtcttttagagctttagcagccttgaaggcaggtgcctttgtagctggaatatcaatttcctcacccgattgcggatttctccctttacgagctgcacgttcacgaacttcaaacgttccaactcctggaatcttgattgattcaccttttgttagtgcttcaatgatgacattaaatactgcttccactttaggtgcagcttctttcttagtaactcctaatttttctgcaacttctccaacaaattctgttttgttcatgttttaattcctcctagtgattttgtttatttttgtgttaaagtataattacggtatcgtttgtgcttcttttgaaaaaatgggagacgtactcacccttatatgtggaaattagctttctttctcccttatggcgattatctcaaaaagggctttcagaccagttatatcaagggttcaaggggattttttcgttaaactttttccggtaaaatcgctgtaccccttgggggagtaaggctcaatacactttctatttcgtcatttttttcttactgtattttttttgccttaatcgatggttctttttttcaatttccaatgcacatttattacaatattttgatttatttgagattgacttaaacatctttccacaactataacaagatttaaatctttttaaattattctgcatgttttccaatattagatcgccaaagcactcccataatgttgatttaaatttgcttttctttttatataaatgcttaaccaaaacatcagcaacagattgctcgtcattatagattttcagcaatctgtctttaatgaccttataaacataaagtttttgcccaggcttaatgtcttcatcattcatgagccatttcttgttctggtctaatcgtttatattcacgaataattgcatcgtccaatttaatatccctgttcttgagcaggaagcggtaatcaaattttcctgccactgctgcgaaattaattcggtcagaagggataatggagtctaacttatttactgtgctttcattaattaactcaacactatgttcttctttatcctttgcattgataaagaagtgaggcactttattttttatgtaatctttaattttttcatcaacatgatcaggacgggtcggcatgaataaggtttttgcaaaatcaatagtaaagttattttccatgcataaccatttgatcacatccagatttatattgtcgctgttccatatcttagtgatgttgttgctgtactccccgatattgatcccataagcaagagttagtgcttcatagatgttcctgctattaatcttttgtttctgggctacagacatttcataatacaacggaacgatgttttccatattacgcttggcaatattgacgattaactcatcagaaataattaaggccttatccccgtcattatcaaactgcagcaacttagatatcggatcatgaatgcttgtgtaaacacctggggtaatgaaccacttttcatatttctcatcttttttgttccacctaacaccatgctctctgaataggtgaggggagcggaggatgtcaatatacccttcatcatataaagaacaatggacatcatttcctgaaagcagtccttttggattctggatattcagaaataatttttcgcagaaagcatatagatcagggcataagtatgtataacgagcaccatcaacaagcaattttcctgatttggcatctttaatcatgcttttctttttatttttaataatttctttcgtgtgatcatcgttaagaagttctggatatagaagtaaagcgtcctgaagagctgtccgatgtttctttttctccgtagctccaagaactcttaacatggtttctttgtcagttcccaatgtggtaatctcttttacagtctttgagctcatttgaattaattcttcaccggagatatctgtaagtgtttggagcatttgataagtgagcttcccttcaacagaaggatcttcttcgttgagttttgcccctaagcatccatattttttataattgccttgatattcttcccacgatgaataatacttccacattttaaactggcttttagtgaagataatttgaacatcatctttcactacgtcccattccttgccgtatatatcagttactttaaaagctttgttttcctcagcaaatttgcgaaaatcaaacgggactaataaaccctttacccatgggagtctgaccatgaagcttttgctactcagagtggggagaatcattccgcagccatccgtatgctcaatgggaatgttcattgtttttcgtgtgatctcgtaggtatctcgatcaatatagtcaacgagactcgacacatcagtttctaagtcgtcgacaacaatggctttatcaatatcaatctcccaagggctactggcactgttagataaggccatatagctattccatttgttaatgctgctaccaccaagggagttaatcttttcaatactcaagccgcatgtcaaagcatcctgatacttatcgtaggtgctttttttaatgaaacatgacttctttgtacgaatttgaccggcactgctcgtgaaataaacgtatttttcattgttatgtaaaaatccctgatcaataatgtccttcaatacttcaaaatggtaagtctggacaaccatgatttcctctgaaagggtgttttctttaatccctaatgttcgggtcaacactgaatcaaataaagaaatcactttattgtcccttaagctgtcagttcgaagtgttcttatgtcattatgttcttcgaatgcagaatagaggcattctttaaggtatgtaattctttgtgaaatgtatttcttatgtttattatttacattgtctaatgtcttaagataatctctgtatctataagacttcaaaatcttattatgtaatgaattttctttgtcattataaaatgctgatgtgtccacgctgtatatgtgaacttgcttagacaatccgtctttttttcttttcaatcaatcctctccttactattttatttttactttaaatgtgcttaatattcgctattaagatattgatttactaaacttcgatatgtaaagctttgcttattaatctttccgtaccatttgtaatcctgataaaggtattcttcttcgggtgttgctgtaccatcgactacttttccctcaataaaccccattaaatgactaaataaatactgctttttcatcttacacctccatactattttatttttactcttaaaatgattaaaataaagaccacttcatgtggttgtgtctttattatatattttatttttactcttgtaaacataaaaatccaaagttaattggatttaatttcgattaattcaaaaagatcgtcaactttacaatttagaatatgtgccatcaataaaagattgtatgtactagggaggacggttgcaaatccctcgctgtcatttttacaccatctagatatacttgctctttcagcttttatttgctctgctaaccagcctttttcaatacctttgctgtttagaaatgaatccaacttacttttaaccctatattccatttaaatcatccttttgctgtttgaataaattttataaaatgactggtttacatacaagcagagtatgattatttgcattaagatacaaaaatatttgcatttaaatgcaaatagacaatataataatcgtatatcaaccaagatacttcagaatcatcagatattaaggaggggtcacatggatacttattttgcttctgtcattgacaacttaactcgaaatgatctgtatattctaggcttattgagcgatgaaggggctgatttaaagtttaaatcaattaggaagaaaaccattcaagctaaaactcaactaactgatgctacttttagaaagagcattgatcgtcttgaggccttgcagtttattattatagtgaaaaacagtaaagagcatacaatttttattactcaatatggtcaagaagctttgagatatcaattaaaaagggagagggtttaatgtttggatttattggagttggtcaggccggtggaagtatagcggatgaagcaatgaagagaggatttcattctgttgcaataaattattcactttcagaccttaattcattaatcaatattcaagataagcttcatctggtagggacagaaggagtaggtaaagacagaagcgtagcagcgaaacatatgaaaaataactgggagtcctctattgagttcataaagaacacaatggaaaagccttcagtacaagttattttcgtagttttctctgcagctggtggaaccggttcaggagtagcccctatattattagaattgttaaacgaatgtcttacacataaaacaatagttgctgtaccaatccttcctgacaataatgaggtattggttaaccagatgaatacactggagttacttgatgacttatctatgccagagacctgtgtcttacctttggataatcaaatggttttgagcaaatatgaagggaagatttctgaaagcagactatacaaggagacaaacaagatgttccttgatttaatcgaagtcttactcaattacacggacagaggatcaaagatcagtacattagacaggaaggatttaaatcagctttttgacacaccaggaatcatgactattgctcaaacagacctcaatgaatttacaattgagggtaagtattttgataagctgcatgaagatatacagaagtcgtggaacaattcgatatttactcctgttgagtttacaaatgtgatgagagctggtgtcattctggatgttcatgagtttttaacggagcatatatcgtataatgagctgtttaatgtctttgataacaagatgcccctagacttatttaaaggacattatgataaagggaatagggcaataaccatccttagtggattaacctggatcaatgagcggatgaagcagttagatgatctaattgaaagtggaaacactgaagttaaagaaacaactgtctataaagcgaagaatcgccgtagagaggatttattcaagccgaggaagctggagaacaaggaatcgaaaaagacctcgtatatggaggcactgaagagactaaaacgttaattttaaagggaagctgcctattatggtggcttttttattttgatttttaatgacccccgggtgatcgttagctataaaagtgcttatcgtaaatgaagatcagaaagggttatttagttgatatagcaatgttttagggctgtcaaaggggataataggtgttttgtgatcgtaaaacgtagacaggagagaggaaaagtggttgtttatttaaaaatctgatgaaaaaggggagaataaggggtggaaaaacattgatattataggcttttacgatagcgattacgatgtgaaaataggctgaaaaatgggaaagtgaaaaaataagtttggtgtggaaatggaagtgctaggggtacatttgttcctattttttggcctttagatgttaatataccccctatatattggtatttaattccctatataagatacgttatgtagggtttttatgatttaggtgataaatttgcacagctaacacaatttcaaatgaaaaacaatatatatttttgaaaaaataattaagcggtcaacttaaaagtgaatacccattcattaaaataatcgtgtatataacgaaaggaaacaaatcgaagtgttatctatacaattcctcatctaactacacacctattttatattcatccttaatgttcatcttttcccatcctcattacattgcatccaccataaactatcctcagcttacctaatcatctctatccgtttccttcaccatacatcatatatccatcctatacacactaagcacacatcatcagaagcattctaatccacctagaatcaattttaatttaatcatagtatcattggtatccaatccacatacacgccttatacagcctataaatagccatgaataatagtgccaaaataatttaaaaaaatccattttaagagtaaaaataaaatgactttgaaagggaaatgtgctataatagagttataggaaaggaggtgtacatagtgcttgagaaagtgggtataacaattgctttccttattcctatcacggttttaatcatcaactgtttaacgatagctgagaagattcaaaacctgatgaagaataagaaaagcaaaaagcgtacacgcaagcgcctccgtagcaagagacaacgcaaacgtatacgcagataacacgctaaaggggaattaatcccctttagtcactacccatattataacatggacaagcacattgtaaacatgaaacgattctcattatggtttacgaacataacatttgttgttttattcttgttgtttctgttcatcaaagattatttcagcagcggaatacagtcgctgattacggctatcttcatagtaacgtgtatcattgtcattttgtcatggatcatttattttactttacgtaagaggttaaataaataaagtttgtggttttctggatattgatttacaaaaaaagatcaaaaagatattgatcatttaaagtgatcatgatataataaagttacaagttaagaggaaaaatacaatgtatataggaggataagaatatgattacagaagatagaatttttgaaatagaagaggaagagacaattgagggatataaagttagacgtgtgaacatgtcagaattagaaatcattgatagagaaaaaattgtatttaagggggaagaggcagaagtagctgaacaccttaactcactactcttttaaatatccattttaaaactctagccgatgcttattagaggtgagcgggataggaaacgaatccttgagggtatacagtatctttccgcgaatgtagaaagtgaccaccgatacaatgataagaaattctctggtcttgaaagacgtattcatgatcttgaagaaagaatcaacaattgaatttcatacatgagaaggagcggtaaaacatttatccgttcctttatttttaatattaaagggggaagtctacacttattatgaataaaattaaaataattgattcggttatggggagcggtaaaacatctgcagcgattaacaaaatgaattctgctggtaaagaagaaacctttatattcatcacaccttatttaaatgaagttgagcgcataaagaaaagcataaagtccaaacaatttttcgaacctaaagtaaagaagaaaggtgataaaacacaatataagtttgaatcctttcacgaactcttatcacaaaataaaaacattgtggcaactcataacctttttaaaaacgcaaacgacgagacaaaggaacttatacttgcaggcaattacacactgatattagatgaagtcatggaagtagtggaacaattacaggtaaagaaacatgatctaacaacactgtttgattccaatctgatttatattgaaaacggttttgtcaaatggaatgaagaaaaaaaagactatgaaacacgatacgatgacattcgagatatggcgttaaataacaatctaatgtatttcaaagacaatatattgatttggaactttccagccgatgtattccagttattcaaggaagtttacatacttacatatatgtttgatgctcaaatacaaaaatattactacgatctgaacaacattaagtatcaaaagtacagttcagcttacatggatggacagtatagcttcattgatcaccgtcctgattatgaaaggagctttaaaaaagagttaagaaacaaaataaaaatatatgaaggaaatctaaacacaataggacaactggagttttcactgtcttctaattggtataaaaataaatcaccttacaccatcaaaaaggtgaagaacaatgtattcaattactttaataatattgttaagtcgtcaagtgatgaagctatgtggacgacttattcagaccataagaacagaataaagggcaatgggtatacaaaggggtttgtctcatgtaatgcacgtgctacaaacgagtttaagcataagaaacacttagcatatacaataaacagatatacgaatactgttctgtataattattttaaagaaaagtacagtattacaatagaccaggacgcatttgcattgtctgagttagtgcaatgggtatggaggtcagctattagggatggagaagaaataactttgtacataccttctctaagaatgaggaagctgctcacaaactggctcgatacctgataaagaggacaaacctcttaaacttaaaaaataagccagtcatatcaacggttttagagcctaagtcttaaggagaaccagaaaaataattaaataaaaaataataaattcgtccgtaaagtgcctttacggccgtctcgtttcagcaagctgaacctcgataataggattttctttatttagaataaaaataaaatatctattgattattttaagtgatcatgttaaaattaaatcaagtcaaaggattacatacatttaagataaaaataaaatagttataaagaatggagaggttgaaaatgacagctgttttaagaattaatgaagagttaaatggaattgaactatattttgatagtaaaccagaacaagaggttttaactcatcttaaatcaaacggttttcgatactctggattcaaaaaatgttggtggagcaaacggacagaaaaatcaatgcaggtcgctaatggtgttactaaacaagaagtctcatcttctaaaacaatcacaaaaaccaaaaagaaagctaatggtgtaaatatgagtctgtgggatgcaacacaatggagtgaattagaagtaaataaggaacaagaagtaaaagaaatggcaaaggaaataagaaagcatttaagacaacgtctcccacaatgcaaattctctgttactactgggggtagctattcacatagcactattaacatcacaatcaaatcaagtccttatgaaaaaggctcagcttatttgactgcgatttatgattattgcaacagtcttttaaacaattatcgccattgctacagcccagcagatccttacactgactatgctggaagctacaatttctatggtcgtgtttcattagattgggaatacacagtgacagagcaaacagaagaaattaaagaagatatgacactgtttgattcaaagatggaagaattcgaagaagccgagaaagcgagaaaagaaaaagaatttcaggaatatttaaaagaacaagaaatcaaaaatgctgaatataagagacggcaagaagaaaagaaacaagccgaaaatatctatagcagcattgtagtaaaacaactgaatgaagatcaagagtattttgttattgatgcacagtttgccaacttaaacaaaaatcaagcacttgatcaatataaagacgaggttgctaaaggtgactacagacttgaaaatgtgaaaattacaaaagaagtgcatttcaatactgaagaagctttaaacaacttttctaacttgcttttaaatgattttgattttcttgcggaaaccggtggaagttttacggaagacaacaggatcaactcaatgattgattattacaatatggacgatttagaaaagaacacagttaaatggaatttatatggcgtaggagtgtactacggcgggaaattgcaatttattgtagacgctcaaggccattcttatgcaagatacgttggtttagtggacaatgcaaaaattgaaaagtcaatttttgataaacaagcgataaaagaaggagaattagacgagttaaaatatcaagcgggaaaaatagaagatctttctagctcagtcattgaagaattaaatatatttgcaacctggaataatgaagactgggacaaatataaagctttactcaaagaaaaattgaaattgaataatttaaatttgagtaaaaaaattatccaacaagcagatacagaggaattgaaaatttctttatacagaattctccatgaagttgacagcattcaagaacaatttaaaaatgctgatcttgaaaaaggtgaaaaatatactctgttttacatatctgatcttggatctttaattactgaaaaaataacgtatgacagttgccagtcaactaaatatgctcaatatgataatgcagtgaagttgacatacaagcctgaaaataaaagaaatttatattaccgacacttctattcagaattattgatgttcaaagggtggcactcgctgcccgaaactgtgttgaataatgtagaggttaaaccagatgggactaaaataattcacagtaagtactactcgtgtgacaaaagacaatttgacgaggttctaaattacttaaataataaaagcttcaaacctctaatcaacacatataaacctagtctataaaataagaggggatgagaaaacatctcattccctaaaaagggagaacaaaaaatgtttaaagataatccggatttttatccgacaccaccacagttaatccgaaaaatgacatcaaaaatagaatggaagcatattaagtctgttttagagccgtcagcaggtaaaggggatttggtagaagctattcacaatcaattcaaatacaccaagaactatagagggaattcgaaatatgatattgattcaattgaacaagatgaaaacttaaggcacatccttgaggggaaaagttatagagtgatagcagacgattttctgacgtttaacacttacaagaagtatgatttgatttttatgaatccaccttttagcagcggtgttaaacatttattaaaggcgattgaattaattgaaaagcaacaaagatccggccaaattgtttgcttactaaatgccgaaacattaaaaaatccgtattcaaatgacaggaaatttcttatacgtaagctagaggaaataaatgcagaagttgaatacattcaaaacgctttttcgaactcagagcgaaacacagaagttgaaacagcaataatttacataagcattgaaaaacaagaatatagcagcgttctaatagaagaattgaaaaaagatgagtcacatagaattaatgaggattataaagcaacacagttggtggactttataaaaggaattgtagaacaattcaactatgaaatcaaagcgggtttaaaattaatcaatgaatacaacagtttgaaacccttaatgctgcatagtttcaatgatgacagtactccaatattgaagctgctaattgataagaataccgaagaaaatgacatagagaatgcatatataaaacaaattagggcgaagtattggaatacgttatttaacaatgatcaatttatggggctcttcacaagcaatctgaaacaaaagtatttggagcacgttgaggaattaaaagattatgacttttctttgttcaatatctatacattgagaattcagatgagcaaagagatgacgcagggcgtggaagatacaatacttaacctttttgaagaatttagccacaagcattactatgatgaatcatcaaaaaatgtgcacttatataatgggtggaaaacaaataaatcatataaaattaataaaaaaataattattccactaaacgggtattgtagttggctcggtcactatagtccaacagactacaaggtcttagaaaagttgaaagatatcgaaaaagttttcaattaccttgacaacgggttaacagaagacataaacatagatgaatctctaaaactggctaagcattacggtgaaacgaaaaaaatagaattaaagtacttctatgtaactttctataaaaaagggacatgtcacattgagtttaaagacaaggaaatgcttaagaagttcaatatttttggcagccaaaagaaaaactggcttcctccttcgtatggcaaggtaaaatatcaggatatgacggcagaagaaaaagacgtaataaatgattttgagggggcacaatcttacagtgatacggtaaataacgcttcttattatatactggatacatcgaagcttctcttgcttacatcataacaaaatacacactttaagaataaaaataaaataagtattgattatttaaaatagtcatgatatacttaaatcaagttaaaacaacagcgaaagcatacatattttaagggtaaaaataaaataaaatgcatattttaaacagaatggagacattaagatgagtacatatcaagtagatttcaatcaattcagaggaagtatggaaacaacatgcgacctatataatttagataacaatacaacgcttcaaaccagcctttaccgtaatactaatagcctttgcattgaatataaggtaattcagcgtgatgataattcaaatagttttgcggagtacgatacacttgcccgtggttacattgaagtacctttgacttacaatcaatttaagaagcctgtaaaaaaagtttatctaaataaaataattaacgcactagattttattattaatcaatatcttattatagaagatacttctcaagaaattaacgaacgagttcaaatgaaagtgagtgcaactaaaataaatgaggaagatcaatctgactttacgaatgaaacctctaattcaccaattgatcaaattaggatggaaagatgggacagggaatatgacgagggagttaaatatttctttgataaatacgggaataaacgtataggggatattatttatattgatacacagcaagagcttgagcatttagaacacatagactgtgataatgtgataaggatttttgtagacaaagagcatgaaaataaaattaaagctattgtacttaaagatataaacaaacattatcaaagaagtggataaaacaacaattttatacaggagatgatgaagtaatggcagtaatgaaagaagtgtcaatagaagaatatgatttatttagaaaatggtatttaaagtataccaatagcagagtcctaaaaacaaaacagagggcagggtttacggctgttcttgacaagaaaacaaaagaaactgtttgtagcgaaagtcatcttatggggaaaagtagatacttaattaaacaaaattattatgatttatatgcagaggaggatgcggagtaatggctaaatgtaatgattgtggtaatgaacgttttttctacctagaggtatcggtgggagccaaacagcttattgatacaacaggtggagctaggaacggaaagatttatgatgtagactattcagattcaggtatagacaatatcttcaataaaggtagttatatttgtaaaaaatgcgaatcgaaagacgtacatcatgaggatggcgaaggtgattataaactctataataaatctgaataaaacagcagtttaataggaaaggggaattatatgcgtgaattagaattattgctcttagtgatgtgggcagaaaatggtgttaacgaagtttataagtataaaaatagaatcaaggcattccgtgatccgttggttaatatcgagttgattaatgacttgagttgcggaggtatgtttgctgacattgacgacgttgcaaaccacaagaatgcttcgtcagtagattataaagtaagtatcgcaaccttagttgaaaatagaagataataagataaatattttattaagaggaatgcctgtctaaataaaaacaccatttaattcgaaacgcttctttatcatcgcaaagaaaaaatgtaaaatccacctattggcatgagttgtcaatgatattgagacgtcattggggggagaaatttgaaaaataaacttgaaaaattgcttcttgaaaagggtgtatgtgaatttcatattaaggaaatgaaggacaccaaaaatataagtgagtatccatatgaattgtattatgatgaagtcggaaacagcgaaaaactatatcgggatgtcccgttaaaaaaaattaagagtttaggattcaggggaaccagtggtgtgtcttggtttgatcacgcgtgttataacggtacagataatattgacattggccgatgtgaaaaagcttttgaatacttaaaaaaacaaagtctagaagaatttcacacttattatcaacactcaccagtgaaattggttcattatgaagatgatgacttttatgctgtttacggtgatggaacacaccgtacaatttgggccaagataacagaagctccaacaatttatgctcaggtaactagagcaagaaagaatccttccttatataaatcatacttaagatttaaagaattagaatcacagattaataggtattttaaggagaatgaccttagctggggagttaaaaaaagccaatactattcagaaatcctttacaaaggtatgccagtagcactctattctatagatccgccttactcatttaaccgatcttcctacagtctcaatgatcaaaagttggatacatggaataaggaattaaatgaatttatgattgagtttgaagaaagttttcgctataggaaaatctttcgcaatgttatgaaggttacgcccggaaaattagagcacaaacttttttcttttattgaaaatttaagtgaaagttggtctacagctaatggaaaggcaagaattataaaacaaggattcgatatgtattgcatcgataaaaaaatcatttaagttactttaaaatatgtacaacagcatgagggatgacgaagaaactaaaggagaagtgatgaaaaagttaataattttatgtttgggtattatcggggtatttcttatagttcagtgtagtaaatttaacaacaatacaaaagtttatgtggatactcaattagaggtaaatcacgatgatgaaaatgaaagaaaaagttattatgacaatgattcaagccaagaaagtgaagcacttaatgacaaatatttaaacaaagaagagaataaggaatatgacatttacgcatatgatttaaaaactagggaaattcaatcacgtaatggacaacgtgaatatgtttatggaggcaacgtgatctctagcactcaagccgaaaaatatggttatcatacaacaccaattactaaggaaggagataaaacaatcaaattttggaggaacgatgtaaagtttgttcctgaaaagggtgagattgtcctggttagatttcctaagggtaatcataaaacatttgttgatattgagcttatgtataagccaacaggagagcctaatggagaatggaattggtgaacaaaaacactactttattttaaaacgggaatcgggctgcctacataagaacagcccttgcagttagctcgcaatccttgttttgactggtttgtttttcttgatattacgtaatttaagagcgggtttttccactattctgtacgaaagaaatgcggatgcagcagtaacagcaattagggctatgatcagcgggtaatcagacaatgttttattaattccagtgtataagaagatgttgatgatcaccatgtgccatatgaaaatccccatacttatatcgtctaaccggttcagctgtcgcaatatcttcggcccattgtaaccaaaccagacgagtgcatagctcagaggtacgaaccataaaaagctccataaggtgctgtttattgaactgagatgcagaaggtcaagtttatagaataaaaataaaattaccgaagacaaaaataaaacgatatgctgcggtaacttgctccatgccttagcccagaagatgcccaaagtgaaataaaacatctgcggcaggaaagaatgtaagtacaggttaccgaacacactgccaggcgcgaactttaaaattatgaaagagactaacacactgaaagcggaaacagcaaaagagcaaagaatcatttttgggaatccgaaacgtttataaaaccaataaattgcgggtaacaccaggtaaaagctaatctgaacaggaattgtccaaagtgaatcgttaaggcgacctgtgccgatgtgatggaatatgtcagggaagtattgagggtataacacaaaattgctaagaagccatgtccagtactctttagtagtgaatactgttaatgaaagagctcctagaacaattaacaggatggtggagacgatagcataggtgtatatagcgggtgcgatcctaataattcggctccaataaaaatcggttacattattacctttaagctgagatctctcataagaagtaaaaagaaaaaatgcacttagaaaaaagaagattgatatgccggtgtgaaatattgctttgctctctggggtataaccaaagacagaaatatttagatctcttgtagcatgaccaatcaacacacaaagagcagcaaacagcctgataacaaagaaacagttagaatgttttacgttcattaaaagaacctctttcctataccatatggcgaataagcagtaaggctgcctataagcagtgatgattatatcataaaaatggaagatttgttcttaaaaatgaactaaaataaatatttttgttcttaataaggtatatttgtgtgatgtagggaggtatagatacttataaatacacgtagatattcatagatacatgtatatctagctatatcaaggagaatgcagataaattaagaagcctctgcctgttctttcacctttatttccaatatagtataatttggaaaagggggagagggaatgaaaaagctaatctttttggctgtgatttgcattggttttatattgagttttaacacaccaagtgctgaggcgaagcttacattagactacaaaaatgtggattttcacatgagtgaggattcagagagtttttcaatggcagattattttgatcggaattttgatcgcacttggctcttctacaaattcacaattaacaatgctgaagggtgtactctaaatatgaaaatcagtaggataactcttgctggctgggtatttccacgtagtgagaagcagtttgtagggaactatgctgactatactgctacagatcgagtagagggagatgctaatcgtaatcatgtgttagagattacaaagaatccaggctgcggagatgtgtggattaaaggtatttatggatttgaacatgaagattcatttgattggtaagcttgatacatagtcaaggtatatccttgaccttttttatggatataatgataatttaaagtgatcatacataatgaatgcgaggtagtaacattgattaaatcaaatttaaagccaatattagacgaaaggaatatcagtattcgaaagctgtccaatgatattgatcatggttttaacacagtcaggaagctgtatcatgatgaaatggagcggtacccaagggatctgttggataaagtctgtacatatttagacattgagctgcatgagctgttgatttacaaaaaagattaaaaagatattgatcacttaaagtgatcatggtatactaaagttacaagaacagtaaatacttacaaattttataggtctacataaaatcgtactttcatagggaaaagaggaaaagaaatgttgccaacttctttaaaagcaaaagttcagcgaattttattaaaaggtagctttaaaaaatctgagagctctaaaagcagagtaaaaggactaagcaatatttcagcgggtttcacttttgagaagatgtttgacgacggttactgcctctattatacatgcggtaatatgactttccggggaatgccaaacgaaaaaaaggataatcaaacagaaaaaatgtatcacttcttattggatcagggtcttcaaaaaaatattgaattgacagagtttggaaataaaaaagtaatcttgttgaaagtggaataattgcgagacactttgaggagtagcataaatttgcactttacaacaaagggagagataaaatgagagaggaaattcaagtgttacttgaagaaattgaagaattagaaatggctttaagtaagtccgataacaatactgtttctgtggttcttcaagaggcaattgataaaagacgcaatgaaattggcgaactaaagccaaatgggtacgtcatagcagacgtagtccttaaagacggtaccgagttaaaacggtgcttagtttttactgtaacagatcgactagggtcacaagctgtaactgaattagttgaagcaagagaaatcttcgaaaaagataaagcggtttatttgcaacaggaatatgaggatggaaactttgcaggggatataggagtacacgaaatagcaacatacaaccttgaatatgaaaatggtgttaatgaataaaatcattctttcatcttaattaataaaggagagtacataatgtatagattcatatcagagctgaatttagacgactcgacaattcaaaggatggataaatcccaaagctttaaatacatcggtggtttttatatgtatgatccccagcaaatcgaatggccaatcccagaaggagaatcatcttcgctcagtgatttagcccatttaagttttaattcttatgactgtgaaaaccaaatgatcgcggatatgaaaagggaattcactgaagaaaagttgttaaatatttttaattctgagtgtccagaaacagcttttaatgacgctgcttcaagaatcattgaaaaatataattaaggtgggttttaattggctagagataaagaatgggttaaaataagcgaactttctgaagaagaaaaacaaagcttgactgccggtactgcagttctgctgcatgataattactataatgggtcgtcagaaaaagcttccttgataagaaaaaaaggttctcaaggaagactagaagacaagtattacgaattgaacggtcaaatggttagaattcttttcggaagcagaatcttaaaagtcccttcttctttattatctgttccagttgcaatcgacagggaacaggaagtcgaactaaatctttcaccagtccaaattgttaaagttatgaagtcattagaactgttactagacttagacaaggaagaatttaaatttaatcgagaagagattgtcctattattggagcagctaagtaagaatctagatagtaatggtattgatcctaacagagtaatgaacgagctgttttcaaggattgattaagttgaaatgaaaccagtcttttaaccagttatgtaagtcaggttgagtcaggaatacttttttgaagggttagatatcaaatgacgatgctaatagcagttaaattcgacaatagcatagtaatgactgctgacaaaagagtgactactacaaatagcttgggccgaattttaaaagtggaatcagatgaatataagaaaataaaaattattaataagaagtacgtaatttcttttgcaggtagaatgtttattgcagaaaaagcttttgattttattgatcaaaaaagcgatattttgaacagtaatattgatccactcttattttttagagaagcttttaattacggaaaatcatgttttgaagcatattattctggtattaacccactttccgtattttttgttggatatattaaaccagacgaaagaccacaattgttggggttttcatcagatgataattaccttggattagaaatcgattcaagtattaaaattaattctaactcccctgatcacgaagacatgcttataagcgaaactgttaattttatttcaacagaaatgtcaaaccgtcatgcctatcatgcaaatgaaagacttttagagatttattcggaggcaataaaaagaaccaatgatccaatgatcggaaaaacaacttactctgttatcttaacttctacaggtgccgaagaataccatcattaatgtaaaacagcacgtaaaaattataattaagtgaggagaatgtaaatgatcaaggtttatacaagaggtcataagataccaaaaaagattaaatcttgcatctctgaatgggattattggtcttggattgtagttaccaatattgcaaagaggaacaaggatgcgaaacgactaatagagaagattgaaactgatccagacaggattgcagaatataaaactgaagatggaattgaagtttatgtaagctacatgattccagtgaaatagaaaagagcattaaactaaatgctcttcttcataccacatctacgacactcacgtaaaaacacaccacttttcactgaactcttgaataaagcgtaatcacagttgtcacagcgaccatatttaacatcgggatactccttataatcatatacaactgttacatcgtagccattagtctcaaaatctttctcttccattaaatttcacctacacaaagtatttaacactactataataccagacgatgtatataaggagggttttaatttgattggaatagcatatttcttaatgctctggcttggtgtaggctttctgacaggatttaaggccttatttgttgatcaggtttatgatgaagagtttaagcaggaactgattgattcattttcaccaggtatggagcagaatatgattgaactgttctttaagaataaaataaatatcatggtgttttacatattaattggattgctgccactggccataaaaattgctggtctgctgaagaggagttagctatgcctgttatcgataccttttttgttattcaatttgaaaatgatgattacttcaagtcatttaaattagatggaagtggttataagacatctaagggacttcatggcgcttctaagttcattacaatgtcagaagctttaatgatagcaaacgagctgcgtacagagtttaatgtcacttctgccattagacaaatcgaagttattactaggtgatggggtgttcaggtgtactggattgaatggattgaggatggggagaagaaaagtattgttgtggacggctgggttgaatgggccacaatcctggaagacctttatcagcagcggtttgagtatgttgaatggaagcggctttaaaagtgttgacagaaataaaaatacaactgatgagacataagaacctgaaaagttactaggggcatttttttggacagcagaagtaagatgagatatatgccaattgaagattttccaaagaaagcttataaatacatggaagcgaaatggttgaaaaaattaatgagggacaagaaactttttgtaaatcaccttaataactatccagagtcaagcttaggtgcggatgttggagatgaccaagaaggtgtagcaaacagacatttaaacattaaaaaatataaaacaggagaccataatccacaccttcacaatgaactacaagaatggtttcctgactcaatagttagacttgaagatgtgtcatttcaaacctcaataataaataaaaatttttatgtttattgtttaactttcaattatgataaaaatattatgagaaagtttggaggttcagtaatggtaattaatgattttccaagtttcgcatattgggtacacaataaaatgaaaaaaagaaattgtgccttatatgctgcgaataattgcatatatagagattcaaggagcattacttttaatgaggaaaacactgatttttatttggtgccaggccttattaaagatagtaagcattctgaacaagaagagtttagatttctttggaggaaaaacgataattctttaataaacagaccaattaatgatctttatgtaccagaagcattaaagttttgctcctttgaaattaatgaataaaactttatattgtttttatggtttacatactacgttcaattatacgtattgaatttgcaaactttttaaatgtatttataatcttctttaaggagttgatttaaatgaattgggtatcttacccctcaattttacactatgctaatgatggtattacagtaaccttcccagaccttcctggttgtataacttgtggagaaaatgatacagaagcaattagcatggctaaagaagctttaggtcttcatttatacgggttggaaatggacggagagaagtatcctagtccctcaccgttttcggaaattaagacaggggaaaacgaagttgtgtgtttgattgatgtgcctatgcatgcatttcgtgatgagtataggcgtaaatcaattaagaaaacattaactattccggcttggttaaatgaagtggctgaagaaaagaacattaatttttcccaggtgctgcaggatgcattaaaagataaactaggactaaatatctttaaggcacagtaaggattcttattgtgccggttcatataaaatacgaattttaaacagataagggttccttaaaaaataattagaataaaaataaaataaatacttgtaattctgacaactctaatgtatattataaacaaagggaacattagttgggaaggggtgtagtaaccaatgaatcttaagcagatgattaagaatgaatgtgaaaaagacaaccagctcgcagcgaaactctcaaaaatagcagggtacaaaaaggttaatggtttttacaaattcatcaacaccccagagaaagaaatggacaacttaggcggtttaattaatattgttaaaagcttgtttcctgataatgaggagcagcttctaagtgattacttcttatcactggatcccaacaaaaaatgtgccagacaatctgttgaatactcagatattaatcaatgggatacgttaacagacaagatagtgtcgaggctatctagctcaaaaaacctagcaagtcaagaatggggcaatatatacagtatacatagaagattgagcgaaagtaagataagtttaactgatgcaataagagcaaccggaaagtgcaaaacagatgaaatgttatttttctcaaatgctatgctgatgtatgagtatttgaaggtaggcgaatttggattgatgaaaagcacattatcacttctcaatttcaacgacttacccgaaggctttgtgaaagattgctatatgaatagaatttcattattaaatgcaaatatttatttaaatgataatgaaattgaaaaatctaggtattattcagaacaagttattcaaaattcaaatataaatcgactaaaagtatttgggcatctaacatatgggaacacattaatttttgaaagctactctaaagccaaagagcagtatcttaaaggattggaatttgctcgtgataatgaacatcataaatataagctgcgattagctctttgctttttaagcaacctatggaataaggataataaatggcttgacttcgacactgataatatccctgataagattgaggtagcatattactatactaataataaggaatttaataaagcagagaaagtaataaatgagcttgagaatatggaattgtacgaatatgattctgggattctagattacattaaggggattctataccaaaataagaattatttttatgaaagcactgcaaagttgaaaaaatctggtgataaattatttatcaatcttccattagcggagctaaggaaaatgggctgtgacgaaaaactacttgaattaatcatggtctaaaattgaaggggggtgaattaaatgaaaaatattattcttggaatagtaatcttgttagcaatggctgttggatttgttgccggacagcaatcaattgagacagcatcggtagaccatgtagaccagcctgtaaaagttgcatcaccaagccgcggggcttaacttcaaagataatacataacttggctagacgtttgatccactggatcaggcgtcttttctaattttaagagaatgttccagaaattcataatataaaaaacaagaacatgggggaattaaaatgaaaaagcatttcggacaagtactttcttatgaggatatggctaaggggtacatggaaatgggagatattaatttagaaatttcccaggaagataatcatcttgaaaatgaagcagaaatggttagatcaaaatataaagcaaaggtatcctaatgaagattaaagacaaatcagcagacattttaacacatacataggggatgtgttatttgtcttgaataaaaataaaataaattgttgcatattattctagcaacatatataatgaagttacaagatgaacgttgttgggagatgaaacaatggaaacaaccagtgccactcaaaaggaagagttgaagattacatcattaagacaatatcaatacataaaacaactaaagaacttcacacgagtcaatctccacctagaggatccagatgtgtttacacctaataatgtaactacaatgagaaaaaatcataaagaatacaacctcattaaagaacaaaaaaattctataaaatgtatttaaggagtaaaaataaaatgaataataaatattatacagaagaaaacaaggctaaagtttggaaaaagcatatgatcgttttaaagtttctagagcagcctgagatagcagtagcttataatgagttcctacgaagagaagcgacaagtgatgaatgggttgggttcgaagaggagctttatgaggaattgacggggatgccaattataaacgtctgtaaggacgagagggtaaatgtcctaaactgaattttattataggataaaaataaattaggtgtgataaaatgaatgcagacatcttaattaacgctcttaaagaatacgacatgttaaagcaaatggaaatctgtaacgccaatataatgctgctgagtaatattcaaggtgagaatgaatggattgttgcgtggaaagaatttgatcaatacttaatgaaaaaaatgatatgaggtgtcattatggaagctcaaaagaaagcgtcaacactaagggattattcaatatacaataacataaataggtggtttgatgaattagatttaagaaacagggatcgagaaactggagaaattgaaaagtctaatactagagccacgtatgaaaggcatataagagagtttttcaaccactatgctgccaaggatattgaatatttaactgagagtgacctggcgattaagaagagtgacctgtatgattatcgaacccatttggctaaaaataaaagcaactccaattcaacaattaacaataagattgccgcactgaaaagtatgattaagtaccttgaatctgaacatgagtgtgatgcatctgtatttaattttagacctcttccaacagaaaagaacccagcaggctcttttgaaggaatatctgaagctgatgaatttgctgaggcagcgtatgttactgagcgtcagaacagattaatgaaaaagatgtttattttgtttagtgcacgtactggtggacgtaaatcagaggtacttagagttgggtgggatgatattacttattcagaaaagcaccaatgctatctcgtcaactttaaaaaaactaagcaaaaaaaggctagaccagttgggatttccactgctttttatgaagagttattgctgttaaagcaagagtatggggaacatgagcttttatttcataagttaacagttgattcaatacaggatatgtggaatcgcgtatgtagagttatgggcattcccaaagaaagaaagataactccgcatagtttacgcaatactgcaacaaacttttcttacagcattaatggtgatattaaaaaagtggcagcgttctctggccacagcaatatcaatactttaaatgaccattatttagtcaatgaaagggattattctcaagatccaggggttttggttgatcaaaaagaagacatgtcctttttagatgatgttaccttagagcaatataaagaattctttttaaaatcagacatgtatatacagaataaacttaaaatgtttttgaacaagtgatacaaataatcatataaaagctttacttgcttatgaaaataatgataaatttaatatgattatgtgaggtgataatgtgtctgaagttttgttgacaacggataaactttataagttaaaaactgaaatagagaaaaatcttaatgatattaaaaatgatcccaatatggtgaaggaattaaaagccacaatggcggacaaatacaaggcactccctggttatatccaagaaattttaaataataatgataacaacgtacagcgtttaaacgaaaaagaagtgtacattgtttcaaaagagttgtattcaattcttgggacgcaagctttagatccgtcaaattattttccaaccagattggcaaaagagcttgaaggtgggagagtattcgccggtgaagaagtagttaagctcccctacaagtttaaaaatgtgattaaaattaaagaggataactatgtcacttccattactgccaaagaactgagtgagttatataatagctccatcctgcagtacaattacaacactcagcgagaaggaaagtacattaagggcagccttattcctgtacctaaaacaaaccctaaatcagttgatgagatcaaagaattgtttattaaaggcgatttaattgtatcaatgttaacttttaacgctcgtcttggaacatctgatggtgatgaagaagttgaatatgattcaagcgaccaaaccctcactgtaacacgaggaaccttattagatgctcttgatggatatcatcgaatttcaggtattgttaaggccattgctgaagtccctgaattagatcaaccattcattttaaatgtgctcaattacgatgaagaaaaggctaaggttcactttgctcaaatgaatacaattaacccagttgaaaaatccagaattgaagaattgggtcaaaaacggtattcttcaaccgttgtcgagcagctgaaatttaaaagtgaacttaaaaataaaataagcccacaaagtgaaattgctattgatagcaattttcttgtaacatattatactttatccgaagctatagacgatgtatttgagttgaaatctcgaaaagatgcgttgaaaattgcgaaatacttggtagacttttttgataaccttttttatgcattcccagacgaatttcttgaagatgatttatcgtccattagaaagcaatcatacattaatcataacgtaatgttttacggttatgtttatttggccaagaagatgaaggaaaacaatgtagaactaaacaagcttgaaaatatccttaatacgattgactttagtaaaagcggaagagtgtttgaagaattaggaagacaaaataatgagaatcaactaaagaatattatgaagaagaaacttaagcgaatgttttatgatgaaattgctgttgtttaaagcctaaaggagaatttaatatgagtgaaatatataatgctgaattgaaggaaaagtttttagagaaatacgaaagtgaagcaacaagaaaccattattggctaaggctaagggatttctcagctacagaaaaaatacttcaaaaagacatatttaatttttctttggaagagctgcgtacgttatttttagatttagatagcaaatctatagattcactaagaggagcaagagctgtaattggacaatacacaacctgggcaatggaaaatggcttggcaaacagtaacatcaacaaagtgtatcagatacaggatggtgacttaaagcagtttatagataaaaacaaaaaaacactattcaccaataaagaagtagaagagtatgttgattttatggttaatgatcaggataaagcgatgatacaggctatttatgaaggcatagatggctatcagcattcagagttactgaatttaacaggtgacgatttacttgatgataacaaggtaaagctgatagatgataaacacggtgtaagaataattactgtaagcgataaatgttatgagttgcttaagcgtgctaatgatcaaacaacttatcatcttagcaatggttcgccagatagtggtcttaaaaacaaatttgctacattagttaaaagcaaaaacatttttaggctaaaatacaagagttctaatcagagtatgaaagctgacaagtttttagttcaccgatcttttagccagtttcaaaaatttttagaagaacccttcttttcacctaagaaccttatcaactcaggaaagctcaacatggcgtatgagatatacaaagagaagggtgaattaaaagtacctgattataaaaaaataactcgacaatacgggtttctgaatgaagacgcggagtttaattcacaatcactgaggaaagtagtgaatatggataacttagaaaaatattgtatcaagtctgaagtaattgagactaattcttaatccctgttgcagggattatctttacataacttttagagtaaaaataaaacatgtgcggataaactcgtgatattttttcgaaaaatatcaggattttgttcacatttttcagaattcgacaaagttagacagagacaaatttgtacatatgcagtaaaatagttctataccctaaaaagggtacaaggaggttcgctaggccaaactccctagcgataaagtcaatgtttgattttccattcatagagatcttcaattgaacagttaagggcaatagcaatgattttcgctgtttttatattcatagaaggtctaaagccgtttgcatagtcacttaatctttgcgtactaatgcctgttcgctttgaaagttctcctaatgacattcctttactttcgaggagaatggaaatcaaacattgtccgatttcaacctcaagcatcggacaacctcctgttatagtattgcttatcatactatatcaattctttccaagtttttaaatgaaagaaaaaagatttgccactaactaggtaaaaggttataattaagtcaacaaaaagggaacataagttcggttaattactaccagagagagggaaacgtatgtcagaaaaggattattttattcaaggggagctgtgcattcctttttttggcaggataaaagccaagaatgaagaggaagcactcttgttcgcatatcaatcaattaaaaagaaattaagaaacaaaacagggaaaatggggtttcttcaaaaagatcaagaaaaatatgaggcactatttgatgtagacatcatgtgtacagaggatgctgaaataacaacctcttatgccgaagaaatagacgattcgtttgaaaatgaaggctataaatcttctcaactgttatcaataaaataaaagcacatacacatcttgtcagtcatcatgagacataaaaaattggtgactttttagtcagactggagcatacaatggattttaatcttgaaattgacttgaaagacattatgagatcagtttccatgagtgttggttctaagaacatacaaagtggagagtactacatagacattatctttaaaaacaatggggattgtttgaggattagaatggatcatgcttcagttttagaatttagagacaaaataaatgaaactctttggaaactggacggcatgaagacgtttatgaagacagcagctttacagtatgagtaaagctgatttttttaaaattatttagaataaaaataaaataagtatttacaacatatggttgaggttatataatcgaattagaattaggaaaggagatagctttaattattgattaatgaaccaactaataatcaaataagaaccatggttttaaagaaatatgcaaagctcttagcgtcatgtgaaaggtcattgcgcagcatagagaataacgaaataagaatggcaattggagacctagattttgttaaagacaatttagaggaaatacaatacatactccgtgatgttgtgaatcagcatgaatgtattaagagtaaaaataaaatttaagttttatagagattaagataagggggaataacatgggtgcattaatcgctaagcaaccgaatggacggtactgccgatttagttcagtggtagactgtccaacgcacataaatatgacgcgtgaagactatttaaataattttactgggacaacaaaaggaagggaagatgctgaagatacacttgcaaattatctccggccgtttcacgaagttataaagtggtacacaccgctgaacatgagcgaaaaagagtttgtggaggcgttaaaagaaatgtgtgacgaaaacccaaaggaggcgcgggaattgtgaacacagcatacagggtgtgggacggcgagcagatgcattattgggatgatgaagggttgagccttaccatcaaaaataacggtgattggactttgaaacgtttatacacagatgttttggttcccgttgtagacagcacgaatagaaacgcggctctcatgtggggcacagggttgaaggataaaaacgaaaaaatgatttacgagaaggacgtcataaagtttaaatctgtctattgcgaaaacaagattataaaagcagtggtcaagtttagagattctcttgggtcgtttgtattcaataggggagacgatcaagacttttggagaatggacgtatccctaagtgaaatcgaagtcatcggagacatttatcaaaatcctgagttattggagggcgcggagtgaatgctgaagtaaagcgtgttgaatataagctgtggtacgaagttaagtacggatggaagcatctcagtttcggcgccaatgatgataaaactgcattggaatacgcagaggaatacgcaaaaaataactacctcataaattataaggtggaaaaaataacgaatgagagattgttttggactgaggagggcgcggaatgagtaagaggtctaccctgttattaaggaatagtgtgaaagcaggacaaagagaaaaattcattacaaatggcattccctatgatgaacttgatacacaaatgatcaatttaattgatattttgaatttcatgattggattgaaaacacgccactgttgttttggacataaaccatatgaggaaattcaagtaatgtttgaagaagaagtaaatttaaaagaagatcaaattctagagttagcggaattagcagggagagaatggaaaggtcttcagttaagctttagcaaatgggcgagattttctccattgatgtttaattggtcattggtactatcgaaaagatttagagatccagaagatccaaataaaaaccgttagctaagatcagttgaagaattctttgagagctatgctgcaaagaagtgattaaaagatgcattttaaacaaataaaaatcagaaaggttgatagaatttgagaacattagtgttattaagaggctgcccaggagtggggaaatcaacttggatcaaagataatggacttgagcaatacacactttctgcggacaacattaggctactgtttcagtcacctgtgttaaacaaaagtggaaaatatgaaatctctccgaaacacgataacaaagtgtgggatttattaatgaaattgcttgaagacaggatggatcgcggcgaattcacaattgtcgatgcaactcattcaaaacaaagtatgatttcaagatataagccactagctcaaaaatatagataccgtgtacatgtagttgatttttctgatgttgatgttcggagaatcttaaaaagaaataaaatgagggctgaacataaacatgttcctgagagtagtattctaaatatttatgaaagaatgacaacagaaaaagtgccatcttgggtaactgttctaaaaccagatgagttcgaaaacacgatgacttataagccaagatgttttgacgattataaaaagatccatatttttggagatattcatggctgcaatactgtgcttcaagagtacttaaacggtgatttaaatgaaaatgaactatacatctttgtaggagatcttatcgacagaggtattgaaaatgcacagctgttagaattcatgatcaaaattaaagattataaaaatgtgattattctggaaggaaatcacgatagatatatcaatatgtatgggaatgatgaagaaacacctagcaccacatttaacaacaaaactaaacctgaaatcgaacaatccaacattgataaaaaagacattagacagttggccaggaagtttcatcagttagcttactttacatataaaaacactacatacattgtaactcatggaggagtttcaaccgtacctgaaaatctcttgatgaccgcaacaacacaattcatcaatggagttggagattattcagacgatattgattatgaatttgcaaataatactgcaggtcaaaatgttgtacagattcatggacatagaaacatgtaccgtctgcctgtgttagcagcagaaagatcatataacttagaagggcaagtggaaagaggaggtcatcttagagtcgttacactgtctgagaacggaattgaaacgcatgaagtgaagaataaagtctttaaacaaatttcaagtgaagtacagagtaacagtgcaactgttggaacaattgatgaattgatttcacacttacgtggtcatgaatatgtgcaagagaataagatgccaaacaatatctcttcatttaattttacaaagcaagcatttagaaagaaaaagtgggatgaaacaaatattaaggcaaggggattgtttattaatactgagagcaatgaaattgtaagcagaagctatgataagttctttaacattggggaacggtctgaaacaagaatgcatcatctcgtggatacaatgaagtttccagtaacagtcttcgataaggcgaatggatatttaggaactgtagggtatgactctttgtcagatcagttggtattcacttctaaatcctttacgtctcaattaacaagtgaacatgcaaaatgggttgaagatatgtttttcaagtcctttgatgaatttaaagtaaatatcattaaagattatctgaagctaaataatgtttcattcgtttttgaagtaacacttccagaaaaagatccgcatatcattgaatacagtaaagacaaactagtcctattagacatcgtaaaaaggcaaatgacgtatgaaaaactcccttatagtgaagtgaaggcagttgcagagagtctttccattgagtgcaaaaatcaagttgcagagtttagtaactggacagatttctatagatggtatctggacgtgtcacaagacttttcaattgaggaagagggttatgtaattgaagatgatgccggcttcatgacaaaacttaagctcccttactataacttttggaaacaaatgaggggattaaagcataagatcagcaacaaacatgagcatacggttaatacaggaagcctttacactcctttgcataatagattttttgcatgggctaagacaaaggacagaggatatctaaagtcaacctccattatcaagttgagaaatgattttgaaaaagaaactgtggtaatggaatccagatgaattcaagataaaagtaaaattttaaagagaaaggttgatgggaagatgaaatttgcaccaatggataaagttaaatttaaaacagctagccatttcaacaaacttcgaacatttaaaaaaagagttcctgaatttgacgatcctttactcggtgattgctgggaatttgaagaagatgggttaaaacaatttgattgggaggagaattacgaatttgtcgctaggcccaaacattttaattgggattaaaaataggatctaattgagtttttaatgaaaaggagctgttataaagtgaaagatatccgagttgtttatgacagaaacaaaactttagaagcggtcgttgtccagtttggagctatatgtgtgagctagtagaatcgcaattaattgatgaagaaactaaagaattcgacgtacttaatgatgaatatcaaggaatttggaaatatgaaaaagggcaacactgcgaagtcgaaatttatgatggggtagacaagtgggtttgtcaagcattattaaactgaataaaaagtaaaatgttcttcagatgatataaaggaggggaaataaagatgagggaatcacaattaagggaagaaaatgaaaatttgaaaaggcaagtagatcatatgaaagaagtctataaagaaaatatgcatcttcatatggcagtaagacaaggtgaacagttaaaagctaacctacaagcttatttacgacaagatgaccgagtatatagtccccatttcattacaccaaaacaaaaacaatatatcgcaaatttgttcaaaaaacatggcttgtctccactcagtaaagcaaaacgaaaaatagttaggcgttttaatgggggcggtctgctttcagagcacgaagcacatcaaattatacaaatgtatgaaagaaagtaatgttaatcttgacttggctggttcaactgtaaacaagaaggaaagagatttttaattgtagttatacagtcacaataaaaagactgttttaaagaaagggtgagaaccgatagtcactttcaaaaaacttagtgatcctgaatatattaagcagatggaaattgaaagaaatgaacgtgagcggatatatcaaaaaaaggagactttaagaaagaaaacggtgtgcttcactggtcataggccgaacaaattgggtggatacgatatgaaaaatccaacaatgcttaaactcaaagataagctgcttgaagtaattgaagaattaatcactaaggaaaacaagtccagtttcataactggtggagtgttaggaactgatcaggctgcttgctggtgtgtacatattctaaagaagaaatacccacatattaaaaacataattgcaacacctttcaaagaacaagataaagtgtggtctgaagaacaaaaaatgtggtacaaacgtatgcttgatgtggcagatgagattattaatgttgaagaattagataaatataaagttagtggagctgtaccaggtgagttttcaccggctaaaatgcaaaaacgaaatgaatacatgattgatcacagtgaagcaatagtagctgtttatgacggaagtataagtgggacaaggaactgtctgaattacgctaggaaaacatacttaggacatcaaatttggaggctgcatccgaaatgtgattttgaattggatataagctatacgcctgaatgaggagggatataacatgagtgaatttaaaattgtgaatttagatggagttaattggggatcgcataatgacgacacgttagatttcaaagaattgattacaggaggaacgattgcagtaggcgacgttgttaaagttgaaggacggggcgattgcccacttcctctaagggagaaccaactttgcataacatttaacaaagaaaatgagttgtttcttgaagaaccattcacccaagaagaatgcaaatcattattcggatcagattttagctactaagcaattactttaaaaggattatttcaatgaaatgaggtgggaatttgagtgagaactataaagatccgagacaagttgcgcttgagcttgtaaagaaagcaagtgatcagattcgctataccaatgatgatgaatttacatttgaagtggttgataaattggaggaaattgaggatatgcttaagaaagatattgataaagaaaagaagaattcattgaaaaattagttgaaaggatgtcgttagcataggatacatcaaatacataattgatacagcctggtttaacttagtttggtttaagtggcatcttggagcggatataagcatatttgatggctgcggatggaatacatataaatatttaaagggtaaaaataaaataagtggaggttataaagatgataaagaggaatctgcttagcaaccacgttgatgagattattggtgaatattacgctgctaaaggatattcagtccatagcattgaccgccaggaaaatggacaactgatcgttgttacagagcgagtagcagaggagaaggaaccggcacaagtcgatattgcgtttgattttgtacatagaagaccacataagaagaagtatttagcttaaaaacggcaaagagtcaaagctctttaccatcaggtgatttctttaaccgattcgcaatgtacttcattacgtttactgcaatcgacactaatgcaataatcaatgctatttcaaataagaggatgtatccaaaattcacattaagcttttcaaagtaatcgctggtaatagagaggattttataaatccctagcataaaaacaataaaggaaacacctaaaattacaagtgactttatagaataatctttagtatgttcaaaattatagataattattgatacaaataacaaacccgtagcaatcttttgggttagcgaatcatcggccgaaaatgattgcactactatgctgatgattaatccagcaataccgattgttttattcaaggaatcacccactcgtatgtaagttaggtatgagtttaccaattaaaggggattttctcaaggcaatacacattaaagttaaattaaaatgctttttaagaaaggggtggaaacatgcttggttatcagaaagggcagcaagtaagatggcatgaaaatggggaaatgggaattatattgtgggtgacaaatcaaggctctgtaggtgttaaatggagctcgggtgaatacggtgaatacaattataaagttgatgagttattactgttaacagattagtatcttacccaaaagtgtgaacgcatgacagcaagaaaaaggtttagtctacataaaatcgtgattttaaacagaataggaggaaacgaatgaatcaagatattcagtttttaaaagaacttcagcaagagttgaaaaatcaagacaacgacggacaagctgcaccacgtttctggacagttggtgattatgaatgggtcgaagctcgagaggaaaatgcagaacggtattctgtatacctgccatatattgcagaagcatatgttttagatgattatttggaagatttaaaagaagatagtgagctatctaaggaagcattaacagagttgaaaaatgacgactttgatgatcctattgagtggattcaaaaatacattgatgaagaagcagaattaattccagaaagaaaggttcatattgtacggccggatacaatgtttttgaccaaagaagaagcgaagagccacatcaatttgaacaagcatcactacacttcagaagctcatacttatgcaatgacagcttggagggcaccaaaagtagagcagttgcttaacatacttgaaacgtttgattggaattcaattaaagacagtcaatacaatctataaggggtgggaaaatgaatacatatgtagttacaaaagaaactgaaaattatctatatgaaataaataaacaaattgtttatgccggtaataataaagatgctgcctttggtcataaacctgaaacaagtgagagcagactaattttagacgtctggtttaatggcctaattgttaaatcattcagcagaaatcctaatggaaactggcgcgttttatttgataaaatggcaatcgcgaagaaagaagttgaagactacagcagaaaattaaacaaggcacaagagcttgtagagatgatagagagagctgaacaagtctagataaaagataatttttaatcagttattaggaggaaacgaaatgaacgtaaatattaaacggttatcaccggacgcacagattccggcttatgcgcacgcaacggacgccggcttcgatttagtggcgtcagaggacgttattatcgaaccgggctgggcagagcttgtgccgacgggtttggcgttcgagattccggagggatacgaaatgcaaatccgtccgcgatcaggcattacgctgaatactagactgcgtgtgcaactcggaacagttgattcgggctatcgaggagaggtcggagtaatcgtcgacaatataaatcgttatacagatattgaaaaggactttcttttcgatatcagagataaaatcgtcagtgctctcgattacctcggagcttgggatcattttgcgaaaggttcgtacatcatccgaaaaggcgatcgcatcgcgcaagccgttatcaagccggtcgagcaggtggtatttacggaagtcattacgctcggcgatagcgatcagaatacgagtcagttaatttaaagtctgaatcgacgcttttcctcaaagtcttcgggatactcattctgctttgacttggacttgaatacaaaccaaattatagcacctagtgaataatccatgactttatcaaaaatccaagttgtgaagagatccataagaattttcattgcatttcacctcccgagacaaaaatgtcctatctctcttagatggcatgtgtatgacacgcatctattaataaaagagtgaaaagtaatatgaaaatcaaaaaagaattgaaaaaaataaaaaagaggtgaaaaaatgatcaaacaagaacgagaagattatataagcaggcttgatgaatatggattgacagaagaaggggatgagggaatgacgaatattttgaatgattttgtaggctatgacatttggtgattatttatgaataaaaataaaatagttatttatagaagggaagggcgcagatggcaacagcagagcaattgaaacgaatgaacgacataaacgatttgatcaagcttatcgcaagtattgatagatgtactttctactgtaagtcaaagaatcggatagcgtatttcagatttaagaaaaaactgttcttcgttgatgattacacgggcgctgacgtttacccatatgaattgggatacgggcgtgcaaatggtttttcgcatgggggcaacatgtggcaactagtcaacagcttcagaaaattcatcataacagggaaatacggcgagctgagggattataaagaaatatgggcttacagctatgaaggttgtatgaaaatccgtcagaaggcgaaggagatcggtttcattgaaagtgttgattacccctacagctttgctgaatgggcaagttaaactaattgattcatgtactaaattttcatcaaaattaattaactttgagctaaggaattatgtaacggagagattagactctccaggattcaaaggaaggtatgcggagtttaccatgcttagtcttaaatctgtgcttaaccttacataagatcggttctacaaatatatattcgtcagtttcagactttacatgtttcatagagtggaatttacttcgttctgcgttcggcatgaattccattattccggctgcagtaccatcaggataagacagaagaaattttatatcctctttggtgtagccggtgataagcacatctgtgtaatcataattaatcactttcagccagctatgggaacgtttattgatttcataaggggagttagctttctttagtacgattccttcaagatgcttttctttggccagattaaagtaagctaatccgtttccttgtagaccttcgattacaaatacattatcatggtcaaggtttaggtctgaaagcatactcttacgttcagtgagtggcttagtagcgattgaatgaccatcaatataaactacatcgaatacacagtaaaccaccttatgagctgatttcttagacataaagcgttccataacagcttcgaaatctggagcaccgcctggggcagctacaatgatttcaccatctaaaacagttccattgggtatattaagatctaacagttctgggaacttgcttgttacttcgttgttgtgacgagtataaagctttatctgatcattaaacttggagaggatcagtctaattccatcaaacttcagctcggtaatataatcatcgtcatcaaatggttctttgattgaatgcaataacattggcgatacaaacaaaatatcacctcctacttagaacataatagctaagcgaaggtgatatataaagcaaaatgactgtggtacttaatgggattcaatcagttccggtgagttgtttttaggcgagttaactaaggatgaaacttgataagcttccatgtcatcagcatcatacggaagcagtaagctttgaagataatcaggatcggtgtttttggggtttagccattccttttcgttcttgtcagtaagaatgaccggcatccgatcatggatgtcctccatcaactcattgggttttgtagtaatgattgtgcaggtatatagcggattgccttctggcgtattccacttttcatataagccggcaaatgcaaagaggttggatgatttaagtttaatcctcataggaaccttagtctttgggtcaagacgcttccattcataaaaactgtccgcagggatgatgcaacgtttgctaacaagcggttttctgaagcaaagtttctcggccaatgtttcagctcgagcattgatcattttatagccgatcttttcatctttagcccaaggagggataagaccccatcttagcttacccagacggttgtttgatccatcattaatgattgtcaggatgttctgtgaaggagctacattataacttggatggtatgcgtcttcagacaaaaattgatctatattgaactgttcgatgatgtcgtcaaactcagaaaataaagtgaacctgccacacatgttcatcatcctttagggttttttgaatattgtacaggcttgatacacgaaaatcaaaaaggaggaatgtgatgcagcggcaaacagttgaggtaaaagaagttgtagtgttgatcagagggatatggacaaagaagaagttcacggatattgaaaaggggcaaacctttaagattgtggagaatggaagagtaaagaaatacatagcaagaacagatccttattgggatgagatgtacgaagcctacataattgatttatttgataaaaataaaataagtggatgtgagaataatggcgatcaatttaaagattagaaagaacaaagcagataagccaaaggtgaaagatttagaggacgggtacttcattaaaatagatgatgctgatgtatacattgttagaacactagacagagagtatgccgctaaagataaacatgaagttattcttatcgatctgagcaccttgcaaatagcgccatacaaggatatgaaggaattaaaaagtaggctgtctaacagaggtagcacagttgaagttatcagacctaaacaagcaaacgttaatatcggttttgagtggagacaataaaaggaggtggagagaatgagagatattaaatttcaggcgttggtagttaaacatacattaagcaatttgggttctaatatgcattgggcaggtatagacagttacgaagaaattattgatgttcatgacatttcttttgataacggaaaaatagattacgttacagataaagacggtgatgaattttcgtttgctgataaaagtttgaaatcggttcgacaatacaccggattgaaggacaataacggcaaggagatttatgaaggggatataattcggattactttcgacaccacatgggctgaagaaccttattacgttggagaagttaaattcttggatagcgaaaactatccagcatttgatttaaggccttggattgattgtgagatgaatgctttgagttggttaaaaagcgaatcagacccgactgtcatcagttatgaagtaatcggtaatatttacgaagatactgagcttttcgaatctaaataaaacagagattttataaggataaaaataaaattaaaaaggggaaatttgatgaagctaattggtattaaaacaagtaactgttttttggtgtctgacaatattgaaggaaagaaatattttcatagtcaattagatgaattgtttttcgatgggaaacgagcaactgaaacgtataaatcagactggtttaagcttgataaggagccaagtgttattgaaaaacaaatgcctgctaaaaaaatcaatcataggtatgaattaaaagaggggttccaggaaactgatttgacgccacaagtaattaaaacttcttacataggtgaagacagtgaatactatgaagtgaagggtctatataatttaaaatttgaagaagtcccgcaacagaatcaaaaaattgagtttgaaatgaatgtaattgaagaaattgacggagaacttaagttgcaaagccataattttaacttgaattataacttactggatagaattcaaactcatccaatgcttcttgaaacaaagccgtgttacttgtcccgagaagaaagctataagattatcagaaaccatataaaagccaatataaaccctaagtttgcaagaatcacgagtgattatgatttctgtttaactgtggtcaaagttttggagctttgcaaacctcaagagtacgtagttgatctaaatacaatgtacaaacgtagaaagcctaaacttgagaaaagatttcaaacaaagcgggaagttgaaatttacaatgttgcacctaaagcctatcagagctacccaattgtagaaccgtttagtggcaaagatgttgaggatttaaagggcaatattaagaaatttctagatgatctaatggataaaattaatgagcctttagtcgaatgtaaatgctgcgaaggaagaggggttatcttaagtgaaaattaaattggacaaagattacatggtaaatgaattgcggctgcctgaatcctcaattttagaagaaatcactgatacgtctaggtggagtattcattatcgtattgtgtttgcatatcaagacaagttttatgagacaacttacagggaaggcgctacagagttacaagaggagagaccatgggaatacgatgaccaggttgagtgttttgaagttgagcttaaggaagttaaggttagaaaatgggtaagaaaagaatctaaataataaatggaggcggaagaatgagagaaatcaagtttcgaggaatgggcatcaacggagaatggtattacggcaatttatcaatcattaagcaaagaatcaagagtatgggtattgatcctggttcttatatctctaataaagctggtgttccatttgcttacagtgtcaggccggaaacagttgggcaatacaccggattaaaagacaaaaacggccgagagatttatgagggggatattttaaaaagaacagtcacggttgtcatgtacggttcaggcaaaccacctaaagatattgatgaatacttagaagttgagtatcgggaagattatgcgggcttctatatcggagaaaggccactgtttgcttatgtggacaatactcgtgatgtcgatactggctgcagatgcagcaaagcagaagtcatcggcaacatttacgaagatcctgagcttatagagtctaaataaaaacgatatttaaccagatagggagatgtttaaatgacttcagaagaagcaagaaattattttgtgcaaaagggacttagttatgaagacattacggagggagatatttgtgctttagttatgctactcaataagcatgttaaacaggcagttaaagcacatacaatgtctgttgatacaatgagaatgagtcagaaaataaaaagcaaatacaaaacaaatggaactttaaaaagttgttatctttacataaacagtcactattttactcaaagagaagcaattagttttaatccagatggttttattggtttcgcagggtgggcagattcaggcaatagacaacctataattagtgcttttactgaatgggttgattatatgagtgaacagttaagacaaatcagttaaaagtaattttttatttaagggggtgataacgatgtgatcgatttatatgatttgagttttaaaaataaaacaaaaataaaaaggagtggttattaattgttgaggattaaaaacaaaatagaggaattgctaaaaaagactaaaggagcagaaaagagagactttggacggtacactctaatctgcacacttcgcaaggttacgaagctattaaagtatatcacagaaaagaagtcttttccagtattggtgacagcattggtttcgttcatgaatccaatcagtatcttagcagcggacaagtatcggaactttgaagagcttaaagcgaatgaatcaccgttcaattttagcgtgttctcaaaagagcaagacactgatgtattaattcttgctccccatggaggtggcatagaagggggaacaagcgagcttgcaaaggaattaagcgaaacatactctacatatctttttgaagctttaaagacaccaggagcctttgatttgcatttaaccagtacgaattttgatgaaccacaagcacttgaaatgttgaaggggcatgagttcacattgtcacttcacggttatgcaagtaatgatcaacatgttctagttggcggcacagaccgggacaaagctgaagcgataacaagtacattaaataatgccggctactctgcagagcttctagatgagggtacgaggctatccggtagcagtccaaataacgtggccaataaaaataaaacaggaaagagcattcaactggaattgagcactggactacgcaaatcaatgttcaacaccttttctctgaaaggacgctctggtacaagaaatgagactttttataacttcattgacactctatcagggtttctcaatgaaaatgtagaagggaagggtttgacaacatgaacatgcaacagcccttatactattttgttgatgctctggattggggaattgatgataaagggtcaaatgcaattgaaacaacagaaggattaaaccgagctttagagtatgcatgctcaaaatcattctataaagtatatgttccaaaaggtatctacctaattgatgcagtgaatacgtcaaagcggttacctgaattcggtggaggtatcaatgttccttcgaatattgagctaatacttcatccagaggctatatttaaagtgcagccaaatgattatcagggttactcctgtttttatatcggccaagcaagtaatgttacgattcgtggcggtcaaattattggggatcgacatgagcatgattattcaaaaattacctcaattaagaagacgcatgaatggggctttggtatccatgttaatggaagtagcaatgtgctaattgaaaatgtacaagtttctgactgtattggagacaacatttggatagcggctgatggaatgatgaacacttcaggaacatatacgccttcaaagaatgtaaccgttcgaaagtgtacgcttttaagaggaagaagaaataatctggctaccaatggttgtgaaggtcttcttgtcgatgactgtgatatagaggaagctggaggagatacaattgggccacaattaggaattgatttagagggctttggagaaaacggaattaaatacgatcacccgtataaattaactgtgcgaaactgcagatttaaaaacaatggacgtggatctgttacagctcacacaagcggcaaggtaattattgaaggaaactacagcgaccatgttatttcctatggatatagcacggatgtcagtatcaaaaataacaagatcatcaatgaaaatgaaattaagacttatggaattgactcggtaggtgtttcaagtactgagtctggaaacagagttcaaattgatggcaatacgattagtggctttgaagtgggcatttgtgtaagaggaaagggtggcacagtatcaaataatacttttgaaaaaataaaagcatgccctattgcaacacatcaagcagaggactttttaattacggacaacaggatagaaaacagtgattgtgttcaagtccaggttagaaactcaaatgatattaaggttgtgaataccaaaggaaaaggaacgagctcgtcttatgctgcaaagataatggactctacccgaatcagtctcgttaataatgagtttgctaatgtatatggtggaatttattgcgaaaggtctcagtcagttcgtttaaagggaaatgacttgttgttaagtgggagtggatacggcatcttttgggataaagactcttctgtctcactgcatcgaaatgaaattcatgagcctaggaatgttgcaattaaaggcacccctgagaaatacagttgccagattagtgagaatcaggtttatttctgtaaatcattaatcgccatccaactgactggtggttcagaacatatattaaaggataatgagatcatgttcaatcgttcagcagaccaaggatatggtgtttatttggagaatacaaacaaggtacgtctcgtaagaaacgatgtgcgcggaattggtggcaagttattatcccacccatattgcacagataaagcaaagaatacaaccttaatttataacacatatgacagtggaacactgaagactgcagaaggagatattgtggtctaaataaaactgtagttttaacaagtttaggagatggatatatggccaatattttaaccaaagaacaagatgaagcaatccggtatttcaagaacaagctgaacatatctgaaaaactgtacatatccctgattaattttaatctgcttagagataaacacgaagactttggtaatagactatatgagctttataagacagacccttatctgtatatcagagcgcttaaagaaggttatgtggttgatcagccaattgaatttaatgaagcaattgtgcggttctatgatggtgaagaacttgctgtgatccataagactactgggaagagatacaatgtgaatgttaaaatgaaaaagcttcctgatgggtttacgctgcaaacaatgaacatgtggtcttggagtgaggttatttgattattcaaactcctttgtaaatggtataattgaattaataaaggagtggtattatgtccatcaattctattggaggctgagtcatgggagttagagtgggaggctaataagataaacattttgagttgctatttaagcggctcttcttttatgaggtattctaaaaaatatcgtcgataaaggagaaactgatgaatttcttaacagcaaaaaacgagtacggtgaaacggtttactttaaaactcttaatagaaggcctcgattgggtgattttgtgaaaccaatcgatacacgacctgtagacattgatggcaatagaattaaagaaagtggcaatagcgcaaataaatatgatgatctagatatcaactctttttatgaagtatacaggatatttaatgttaagcatgtaatcattaaagataaactcggtcataaagttcaattagattcaagtcaataccaattagcaaagaaaatcactaaagaggaatatacgaattttaatgaaaaacttcatttattaaaacatattgataacaaccttaaaaggattagcaacttttccagctaaataaaagcactttgtcgagctgcagatagtagctcaactctttttaaaacttttgagaataaaaataaaatagttattgaccgatccgttttggtgatgtaagattaagttatcccaaagagagaaaggaggaaagagatgaaaaaggaattaaagatactgaaagtatctgtcgaagccttacatacctacaaaaatgatgtcaaaaggaattacgacattgacgaagaccaagcaagaagaaagttaaccaggaatgtgatgttggtaaaggaatttaaaccaagaggaattaaaagaggtcttttttctaaaacatactcatatggaaacttaaagatcacaattcgacatggaacagtaataaggattgaaaatgtaaaaggtgatcctgaaccttgggactttccaaaaaagagatacatagaattaaacaagctacttggtatcaaggattgtaagtttagtagcaagtctcattataggcattttaagaataaaaataaaatataatattaacggaggcgttatattgagcaaactttataatacatttgaatttatcggtaacctatttatttcaaacaataaagagaaattccatgaaattaaggaatatgacagcggatgggttaaggaaagattaagcttcgcagttcaagagtcaaaaacaaacagtgtttttgttgagattgaaggtggttactcaaaaagcaaacaaaataaagtgttttcattcagcaagggtacagaaaatgaaaaaggatcaagactcgaaattccatgggaagatcggttgaaagaagaaacagtaaacatggttgctgatttttctaagatcctaattaacttaaacgatgagtcaacaaaaaccaaattaaatgaattgaagtttaaaattagagggttggaaatgaaagactctcttactgaagaagaaaataaaactttatctactctcaagggagaatataaacaattaaacataaacggtgcagaattcattcatgaatacgatgctattcagtacttatcccaaaatctcgaaaagcataaagacaataaatttaaaattacaggtaatattgaatacaattcatggaatggacggaattttagaaagttcaaaatcaaaaccattgaaattgtaagtagtgatacaccatctcaactaagagccacaatggatgtatttttcacaagtgaatctttagatgaatcgtcatttgaagaagaaaaaaggtactttgttgatgcatatgtgcttagctatgataatcaggcaaaaaaagatcgattttttcctcagcaattagtcattaatgcacaaaaattggactttgaaaatgatttacatatgaaacgattaaatctcttgaaaaacttctttaaagttgaaaatgatgaagtatatcaccttcaatgggttgtgaatattttcaggggtgctgatgagattgagtttaccgaagaggaactcacggaaagtcaaaaggaaatgattgctttaggtttaaacacactagatgactttaaacctaaaggagggctattgggcgaaaatcgtgaagaaaatagacttttaaaacctattttaaaaaagattaatgattctaatgattttacagaaggtgctgcaacatctacatatgaaattgaagatcttacatatattccacaacagattcaaaattctacaccacccgtagaaaaagaagaacctaaagtgactgaagaagaaaaagataatgcatttgatgatttatttgcttgatttgaaaagacctaactgacatttatttaaaaacaataaggagatgtttatccatatggcaagaaaatttggtaaaaagaataaaattaaagttaatcctctcgattataacactggaattattggtgaatcggggatcggtaaaacaactttagctaaagaagtttgcgaagaattagtcggagcagatgggtatataatcttgaatattggtaaagaggatggcatcgatgccatcccaaatgcctcctatgaagatgttcctgattggacaacctttaatgaaattactaaagatattattaaaaacagaacaacagattatgcagatttaaaggttttagtatatgacacatttgatgagttaattaaaattacagaaccagaagttattcgactacataataaagctaatcctgaaaaaagagtgaatacaattaaagcagcgtttggtggtttccaggcaggagaagacaaagttattgagttaattcttgagaagatgtgggaacttaaaaaggtcggtattagcatgtttattttaggtcatacgaagaaaagaacaatgacagacgtagttacgggtttggaatacgacatgctgacaaccaatatgacacataaatacttcaatgcgattaaaaccaagctgcacgttttaggagtagcatctattaatcggtcgattgaaaagaaaacagtaaaacaaaaaattgggcctgacaaaacagtgggaacagttgttgatgaatcaagaatcatcacttttagagatgacaactttaatattgattcaaagtcaagattctccgatatcacaccatcaattccattagatccgaatgaatttattaaagcaattgaacaagctatccatgtggcttttgataaacaaaaaaataatacaaataacattgaagaagaaagaaaagaacaagagcaaattaaagaaattcaaattcacaacgaagttaacaactcatcttttattgataaagaagagaatgagaggttggccgaagagattaagacactattccctaatgcaactgccgaagctaagggtgaaatgaagaaaattatggatcaatttaatatgaaagattttaaaggtgtagacattgtaccaactacagcattcgagaagatagtcgaagcattatctaactgaaggaaaagagggggagtctcccccttatcaataggagagggtattcttggccagaagatgtgtatgtcaaatatgtaaagctaatggaactgttgatacttttttcagggtttctgatgataaggggaaaaataaatactactgtactaaggatgaatatgaaacctatatcaatgataaggtgaaacgaaaaaacctcttaaactacatagcgaaagatgtcttgaattatagagagggtcaagtcattcctccaatttttctaaaaaagatagctgaactaaaaagattttatgattatgaagtgatacaaatttgctttgagaagaaccaacaaacaattcaatattggttaactaataaagagttttacaacgagtatgggatgattagctatatttttaagattgttgaaagtaacatcaatgatgtttataaggaatggctgcatgaacaaaatcagagaatgattgaaaaaaatcataatcttgatattgcaattgtaaatcaaactaatatcgttgattccacatctttaaaacaaaacaattcaccaaaaaatataacagagtttctggatggggaggacgagtattgaacaacttagattcttatccaaaggaattagttgaaaacaggggacaaattgaaggaagctttatattttgtttatggaaaaaccctgatttgtatgaggattataaagaccacgtgagggcggatagagattttctaacagaagacgggaaattttattactctctaggtttagaactgagcaacatgaattataagagctttgatgatgcgagtgttttcagctacatagaaggtaaagaaacattaaaaaatggttttattcggcgaggtggaatgaaaaccattgatgaactcaagcacgtactaaacgatgaaaatgttgagacatactatgatgaactaattaaatttaacatgatactaaagcttcatgataagggattcaatgtttcgaacgagcttgataaattcaagaagatgacgagtcaacaattgtacagttactttgaatttcaattagataatgtttttctaggtcgcggttcaggagtgaaaattgaggatcttgatttgaatgaagagtttgtcgaatcaattgaaaacggggaagaaatgggattaagctattcagctgcatgtccattattgaattatcacacgcttggacttcataaatctaatgttcaaatttttgctggatttagtgggacagggaaaacaagtttttgtgtttcttcttatatcatgtcaattttagatcagggtgaaaaggtaacaattatcgccaatgaaatgaataaaagggcttggcaacatatttttatggcaacaattttaagtcataaacttggttattatggtttgccaagaaagaaacaaaaaatgggcaacctaaagcatgagcaaaaggaaatgttacaaaaggcaattgaatattatgagaagcattacaaggggcgtatcaaatttgccaagatatatgattacagcattaatgatgtaaagagaataatgagaagaatggcaaaacaaggcttcggttatatgctttacgatacatttaaagctgaagatgcggcttcaaccaatgtaacaggtgagctaattgaagcctcaaaacagttattgcaagttgcggaaaaagaggatatttgcatcatcattacaatgcagttggccatttatatggagaatacgagatatctaacagcgtcttgtttatcaaatgccaaagcagttaaggagattgtttcagagttagttctaacaagacctttatgggaggatgaattcccaggaggaaaattcgatgttaaaccctatagattcaaaaaagactcgtcgggaaaatttacaaacattaaagaagaaattcagttagacccaaataagaagtatagattattctttttgaataagacacggaatgacgaaggcgatacagtgttgttataccaatttgacggtgcatggaataaatggaatgagctcggttattgtactcctaaacatcagagaactacagagcggacatgattaccaagggacggtgaaatcatggacgtatatgatcttaagaatcacattattgaaaagccagagtacatagtacttattttagaacagacggggttttacaatgttgatgaacgcgggaatgagtacagatgtgcgagaaaaaaaggaagaaatccgacttcagtaaaagtaaataaaaccactttaggtgcaacctgtttttcaaccaacttaaaaggtgacttgataacacttgttcaaaataaattgggtttatcttttcccaaaacaatcaaaaggatatctgaaatagttgattataaaagtgaagaagaatataaaccacctgagttaccattcggaggtttttataagaatataagaagactaagtaatccaatggatttggatctagaaacgtattccgatgacattttagatcaatttgtatctgttccaaataagttgttttatgaggatggaatattacctttaactcaatctttgttccaggttggttacgatagtgtttccggaagaataacggtgccatggaaatctcttagtggtgaattgtgtggtgtaatggggcgtcttaataagaaggaagttaatgatgaggaaacaaaatggctgcctattatttcatttcccaagtccaaaacgctatacgggtttgttgaaaattacagttcaattagagaaaagagcattgttatgatcggggaatccgaaaaacattcaatggccttagcaagtaagggattgaatgttggagtttctttaggaggcagctttttaagtgaaattcaagcaaatcacataaaatcaatgtttccgaaaaagtcattagtcatgatggatgaaggattaggtgaagaacatagcgtagaaattgccaacagcctaaagtttgaaaatttctttgaaaatgaagttgggtacatatttgatcgtgaaaacaagtatctgcctaagggatcaaaaatggcaccagcagaccttgataaaagcactctacaccgtctaatcagagactgtacagtttggatatgaaaaggagatgattgattgaaagaaacattaaatgaattgagacaacaagggaaaaacatttattccttttcaaagcttggaacctttaataactgtgaatatgaatactacaatacatacgttttgaaaaagaaaggcatagataatatttacacccttatgggttctgaattacataacggaattgaacagatttataaaaatgaattagacattggtgaatttaaaaagggatttgaaaatagattaattgaattagagctgaatggagtcaactttccgagtgactcaatcggagacagctggaaagcagacattggtcatttcctaaacaattttaataaaattgacagcaaaatggttttagagaagctgcttgtatttgaaatatcagatgggatttatcttcaaggatatgtagatgcaatccttcccagtgaaaaaggaaaaccatacgttagtatttatgactggaagacatcaagtaagtttgccggcaagaaattaaatgaagcaggaagacagctattgatgtacaagcttgcattggagcaaacaactgacttaaaagtagataaaatactatggttcatggtgaaatacgtttatgtatgtacccaaggaaaaaccaaagtgaaaaagaaaatgtgtaacagaggtaagtgggtaaaggaaatacgaatgaaactagaaaaagagatgcgcactttggagtatgatgatttcgaaattgacctattgttagataacgcagtaaaagaaaatagcattgactgcttacctgccgagattagaaataagtattggcttgaagattgtttagttgaatacgaagttactgaagagaaaattaatgaactgaaagattatattactggtactgttaaaaagattgaaaataaagaccgtgaagatgaaacccaatgggaaccagtgaaaatagataaatacaattccttttattgcagtgtcttatgtggtcaccgaaaaacatgcaagttttataaggattttttaaataaatcatcaaataaatttaagaaaaaggataagaccgatttgtttgataacctattttcttagggggtaatgatgaggaagatattctatgactttgaagtttttaaacataactggatggttgtgctgatcgattatgatactaaaaagggtaaggttattgtagatgatgttgatgaactgaaacgattctataagatgtttaaagatgatatttggattggttacaactctagaatgtacgaccaatacattttaaagggaatcctgttaggaatgaatccttattatattagttcaagaattattaatgataatgtaaagggatttaatgttgttagagaaggttataagatcccactgaataactttgacataacaactggtttccacagcttaaagcagctagaaggctttatgggttcaaggattaaggagtcatcagtaccatttgatatcgcaagagcattaacagaaaaagaaattaaggaagttgttgagtactgtattcacgatgtgaaacaaacaattgaagtgtttgataataaaaaagaggaattcgaaagtcaattggctttaattgaagcctttgatttagaaatgtctatgtttacaaagacaaaagcccaattatctgcatttatcttgggggctgaaaagcaaggaaacaggggagatgagtttgaacttagatttcctaatacattaaaaattgaaaaatacaaacacattgttgattggtatagaaatcctgaaaatctagattataaaaaaaacttaaaggttgatgttgcaggtgtacctcatatttttgcctggggaggtttacatggggcattaccaaagtataaagatgaagggataattttatgttgtgatgttgcatctctatatccttcaatcatgattgaatatgattacatcagtcgtaacgtgaaaaaccctttgaaatatactgaaatcagagatacacggttagaattaaaacgcaaaaaagatcctaagcaggctccctacaagatcgtcctaaactcaacgtatggagcaatgaaagatcagtataatccactttatgacccgttaatggccaataacgtatgtttagccgggcagctgttgttattagatttgatcgagaaaattgaaccgtattgtaaactgattcagtcaaatactgatgggttgtttatgaaagttgagaaagaatctgatattgatttaattaaggaagtggcgaaggagtgggaaaccagaacacgattagatttagagtgggatgtttatgagaagatttatcagaaggatgtaaacaactatataatcattgataaagaccagaagtataaatctaaaggtgcttatgttaaaaaactaaacaacctggattatgacttaccaattgttaataaagctatgattgagtattttacaaaagatattccagttgaaaaaaccatcaatgaatgtgatcagttaagagaatttcaaaagatatcaaaggtttcaaacaaatatatgtacgctctctatggagaagaaaggctacctgaaaaagttttaagagtttttgcttctaatgatgaagatgctaaaggtgttttcaaggttaaaacagaagaacgaattgaaaaaatcggaaatactccaccgcgctgctttataaataatgataacgttattgatttaaaagttcctgattatcttgataaggaatattacatagagatagccaaaaaacgaataaatgattatttaggaatatcgaatagaaagaaaacaaagaaggagaagtgatatgcatcgccattaagagtaaaaataaaattaaaacacacattttcaagtctgtttatggtatgatgattttgattcccttaaccactttttcttacataagttatgagcaacatttacataaaacagagggaaatgaagactcaataaaagaatcattttataagaagcctagacagattaggataccatcaagtgagaatattgtcttacggctatttaaaaaagctcaaactaacaaagaacagcaattaaaaaggcatacagagaagattatctcagcaaaactcattaaacctaagcaaagtaaaaaaaggcacaggaagggaggtgagacggtaaagcataaactttttaagagtaaaaataaaattagtattaaagaaaaagaaaacaagccaccggccgcaaagaaaaccatccaggttaagctgagtgcttatattgcccactgccaagaaggatgcacaggaacaactagaacaggtgttgatgtcactcaatcaatctattacaaagggtatcgtgttattgcaaccgaccctagtgttattcccttgaattcaatagttgaagtaagcattggtgggaaaaagttcaaagcaattgcaattgatactggaggagcaattgttggaaataaagtggacttgcttgtagcaaccgagcgtgacgcaattaattttggcaagcaaaaggggacaatctcaattattagttaggaggcgattaattgccgaagttttggtcttatccagaagggttaaaagtcatcataaatgagaatgcaaagaacgcttgtcctcatcatgttggacgggaagggaaaattattgagctgctacactctgccacatatgattacgcagtcagtgatgaaacaggtgatattacattcttcaaggagcatgaattaaatccagctaaaggaggttgattgtatgtttaaaaagggagagaaggtgattgctggtttcacaggagagattggtgttgttgcacaagttgataaaggacatgagcaattagaagttgagtatccagacggctcatatagagtgattggcttcagcaatgtaagaagggtggaagataaatgacgatgattattttagaaggcactgactgctgctacaaatcaacagtagcagataagctaagcaaagaactcggatatccggtaataaaaggatccagctttgaattagctaagagcggtaatgagaagctgtttgaacactttagcaagctggctgatgaggacaatgtaattattgaccgatacatatattcaaatttagtttatgcgaagaagttcaaggattactcaatcttaacggaagagcaacaaagggtcatcgaggagaagattagggataaagccaaggtgatctacttacatgctgatccgaaagttattaagcagcgtttacttgaacgtggtgacgaatacataaatgatcgtgatattgagccggtattaggattatacagagaagtaatgagcgatgttgggttacatacatattcatgggatacagaacagtggtctagcgaagaaattgctaaaggcataatctttttaacggatggggtgatttatgaagaaagtaattgcaattgacatggatcaagttttagccgatttactaagtgattgggtagcctacattaacacctatgatgatccttttctaaaagaggaagatatactgtgctgggatattagcaaatattcaaatacccaaaacaatgtttacaggcatttggattacgaattattcagaaatctggatgttatagaaggaagtcagagagcagttaaggagctggcgaagaaatatgaagtatatgttgttactacagcaacaaaccatccagaatcccttaaagcaaagttagaatggctcacagagcattttccatatattccacatagtaatgttgtgctttgtggcaataaaaacataattaaagcagacatcatgattgatgacggagtgcataacttagaaacatttgatggaatgaagatactatttgatgcaccgcataacaggaatgacaatagatttattcgtgttatgaattgggaggagattgaacggaaattactttaaaatatcattatatttagagtgaaaataaagttaaaaggagtgaattaacactccttagtaaactaacgtgcttctactgtaattttataaatcacataattgtcgttaatgtcatacgcgtaaaccaatgctgtgcccaaagttgaatgagaggatacgacaccactggaactaatgcttataaggttgcttccagatacaatttcccatcgggtgtagccttttaatagagatacgttagaattcctcagcatgtgaaaatcaactgtaccaagcggatcacctagctgcttaacttgatcaattgatttgacaggggttaaagcagaagcctgtgatgtgaatgcagggagtgctagtgctgtaagcaatagagcagaaacaatcaatcctttgtaaaactttttcataagaattacctcctaggttttgattgtgattacatctccagtctagcatgttaaatatttgaaatgtgtgaagtgtttgtgaaactgtttaaaatatctcttttaaagagaaaggggagactgtaatgggttatagacattatatgtataaaatcagcaaggaacttgtaaacgaaataaaatcaatgaattacaatgaattgtccaaaaagttcggtgcaataggagaagaaggttatttctatataggtaacctgcctaaagaggaaatttgggagtttgggaagttgtattgggatgatacagccgaccgcatttattcaaagggacaccctctctttgaaagagaagaagttatgaatgaattatcggattatgttccatatattgttggtaaagaagggcttgaagaagctattgaaatttataaaaacaaagtcattgcaatgtacgagaacttgcttattgatgataaaaatggaactgcttcagtaaaacaagagcagcatattaagaacaacttatctgagtggactagaggatgggcgttaaatacggatattaatgattcatggctaacatcttcttggaaatatgaatacagtatttttgagctggtcagattattaaaaaccatagattttgagaaagagacaatattattttacggttggtgatctaaataaaagatcaattttatcgaaatgagggtgtgaaatggaagttagatggttagttatttttaatgattgtaaaaccggcagttctttgagtgagcttacatatagtaaggatggggaaggaaaccacctaagattagagtcaatggtgcctcgtacaggtgactatattgtaggaggagatctgtcatcagatataaatgataagaggtgctttattgtgaaaaatgtcttctggaatctagataggagagatatagaggtttatctagatgaggttgacaggactgtttttcctttatataaatcgctataaaatttgtcttttaaagagtaaaaataaaatataagaggtggagtctgtagtgaactacccagaaagcttaaaagaggaagccgaaaaaattaaagatgaagtaagaagcggcaaattagacgaggggaaaataaaagccattgctaagtctgcagttgagtttttaagatctcaagaaaagagtcatgctcattgtgcagaagttgctggagcgattgctgcaaacctagatgagttcttcaagtcttatctaaaagaagattaatacaacaagataacaagaaaggataaagggatgtttattgaaaaggtactatgttagatgtaaagatcacaaaggcgaaaacgcgtctttggtaattgaagcaatgtctacagaagaggctaaacggaaggcattagacatacataaggtaaagactgtttataacgtgagcattggggaaggtagggggacaaattgccttcagagaaaacattcgccgtacataaagaatgacaacgggaaagctataatcatattctcgtagaggaggtatcggataattagggatactgccagggatatcattaataatgacgttgatgagattgaggaaatattagataagctttgggtttatttagagaacaatttaaggccagaggataaccgtatatggaagaggtgtgattcggatattttggcagcaacagtaaagctaagaaatttaaaagaaactttttaagaataaaaataaaatagttgttgattgtttgagagaatgcgagtatattagaaatataagaatcgaggtgatgcattggagtgtgttaaatgcaaggatcacattggcgaaatcgtttattacataagaatagctgacaacaaagaatataaggaattcgcggtacataaagaatgcggagaagcaatcaagaaagaatgcattgaaaattgtaaagacatgaaattagaaaagacattggattacttgcagttactttaagagtaaaaataaaatattccttttatcgagaatggagagatgctaaatggataaattgaaagtttgtttacataaaaaaggtgctcatacgttagaaagaactgttaatggaggctggatattagattcaaaaccaattactcaggatcaagcaattaatgaactagttgaagcggttagtgatttaggatattggtgccaagtagcaaaggatgttttagataatgaagactttaatgcagttcaagaggcgtatgaataccatgagtaataatctagtccattataagaagggagaatgaaatgtcatatttggtgctgggactaatcttgttcggttcaatattcataggtaatggacttacaagtttagttgagaataaaaactttaaagaagccttgccattttatctcactgttttcttaatgggagcttgctcgctccttatcggatttattcttacagtgatatgaacaagatgaagggaaatagtgaaaggaaatataaatgatttcctgggaaagcgcagtatgcgacaaattggaacaaatgatgtctttaggtgataaacaaaaaaggagcatagagccatggaaacattagatgcaccaatttatgagattaagcaagaaagcaattggtataaaactgagaagaaacgaagagaagatattaacaaattctttgatgaattcgaagcaacatacggaattaagaatggtttttcgttctatcattccgagtatttcggagtacgcgcaggaacagaagcatatgacttctttaaagatgaagtggtgaaaaaccccacaaaagctggcttctatgcatttaaaaaacgttctaagtatttcacagacataaggtctatgctagagaaaatagaagaggcaaatcctttcaaaggccatgatgtgttcgggagaaataatataactgcaagccagtgggtaggtgatagatggttttttggcgtaagagatgagaaacgtgtagaaggtgaagaagctgtagctattgacttcaaagattatcttaaaattatcttggagaaattaggttaaaattcaatttttataaagaaaggagaaaaacatgagagacattacatccgaattcacattgagaggagtaaacagaaaaactctgaaactcctggcaactaagagtattgattatccagatacatgggtaaaggttcaaattggagatcaaatagcagaagttgaggcaaagcaactgttggtggcaataacggcatttaatgaaatgtgagaaggaagaaactaacatggagaagtgtagagcagtatttaaaggcaagaaaatagaaaagatttaccttttcagggcatatccatcgtgttttcatggcgtccatgcgaaacgaaagccaccagctattgaccacgagtatttagatatatctactgaaactttttatgaggatgaaattaattttgaagttaactgtggtgacactctttacataaatgaacttgatgaaaatgttcatatagaaaaaaaggtcaaaatgcttgatgggggatggatttacttcactgattatgtcattagcacagtcgagaataaggagagtaaaattcaagctgaaaaacaattaagggagtatttagacgaaagtaaagtaaaagaaaagcatgataatcagctaggaaataaaaggatatcattttggcaacatttgaaacatgcttttaagaaagagatgcaacagtaggaggtgaataagtgggacgacataaagcaacatttgaagggaaggtaattaagaaaagttggacattaggcttgtgtgatgcccttgtcccaatcgagcagcaatgtgagtatcagacattttttgaagggaacatcgacttagacccaattgaagtcggagggaaagtgtatatcccagggtttaacgaatacgtagtcgtaacagacaggcaacgcaacacaaaaaatgaatggacatatcagactgacaaggtcattaaaacaattgaggataaagagagccttgaaaaagcaattcaaaaacaagaaaaaatagagaaatggaatcagcaagttaaacaagactatgaacgctttaaagagcaagaaaagaaacgtaaaacttcctggtggaagaggctaatcactaaaaaagactaaaggagagatatttattgaataaggatacaaaagatatttggaacggtttctttatcggatcaggttctctgattgtagtggggttactcatttttgttgaagcagtgactatgtcactagttgtctattatggattgaatcatgtgttaaacccattgcttattgatacatacaacattcaaaatacccatatcactttacctcatgcatttgtgattggtgttttactcaacgtatttgtcaaaggtgtaaaacggtcagatcaggaaaaagatgagaacattttcaagaaagccggtaagtctttacttcattcagcttttgcattgattgttctgtatgtcagtacattgtttatttaacgaaggaggaatctgaatatgattaaatcgcagcaagttaaagtttttagagagacgttacattgtgatgaatgcgaagaagctccagagcttgtgttttcaaatatgatgctcacatcaaacccaccgaaatatccgtttcaatgcccattgtgcatgaaaaaagtttatatgaaaacaacctatccaaaggttagataccaatcagttgattgaagtctaaatgaaagttttattttattgaaaggatgaagaagaatgaaaatgagaaatgtaaaactgtacaaaacgactgaaaacgtttttcttccaaatgaaaaaacattggtagggacttttgatgattgtgaaatgtatgaaggagaaaggagtgtattcttagagattgcaaataaagatgatcttaaaccaagtgactctagtattcatatagaagatcctacgattttagaaatcacaacttgtcaaggcaaaacaaagactattaggacaaggaaaaggttaactgacatttcttctgatttaattaaaattgaattcacagttctgtaggtcgtaataaaaggatgattttagagagaaaaggaggaatagctatggcttatgatgagatcaatgggaaattaattaatcctaaagttagcgatgtaattaaagcgctacaagaccaacttgattttaacggagatacaccaattcaattcagaattgatggtgaagaaacaagcaatgaaattcaattagatccatataaaaatgttcttgtgtttcatttagatgaagtttaaggaggaaagctacaatagacacatttgttttatcggttgtcaggatagacattataaaggcggtttatatatggttattggagaagcagttcacactgaaacagaagaaaagttggttacatatgaaggccaagacggtgttctttggaaaagtgattattgatgggaaagagatcaagagattcacaaaagtaaaataaaaggagaattggctatggggattaaagcagcagtttttgaaataaaagcaacttgttacgctcatgagggatttaataacgaaagtgaatctgttcaaggggctgcgttagaacagctaggaaaggatatcgtagataatttactcgaaaacggtgttgatgatgtaaaaatcaaaggcgattacgttgaggaattgggagttgagaagcccgttatgaagtacttcgaagtgagcgatccctattatgcgttaattaaagcttactcaaaagaaaaggcaatgaagttatatacaaaagaagttgctgatgatgacggggaattaagtgatgagatgactgaagttggacaagtttatgcggcaatacgacaaggaagggttccgggagaaggtgaagagcttatgccatttaagcaggttcttgaagagatttctaatgatgaagaaatggtattactaatcgagggcagtttactttaacggataaaaatacaaggaggtgaattcatctgggaataagtcaaagacagggcaaatatatcatggaatcgattaatgaaacaaattcaattgcagaaataattggtcatgataaagctatcagtgaagtgttgcttctattaagggaaagagtgttgtttcttcaaagtcgatatgattttgaagaagtggaaataagattaaatgagctcatgaagctgtatgaaagtatcaataaacttcaaagaccacgaaaggatgatgaaaatgaataaaaaatacggactttattgcatgggaacacttgttaacacttatgatgacgctattgaggctcataatgatgctgtgtatgctcaagaagaaagtggagtgccgcatgaagtaagagaaatcagaaaaggagagtagataggatggaatacactaagtatggaaatcttgtagaaggctatataacattcaatctttattttgagacatttgaatacaaagaagatagcttattagaacaagtaaaattcaccacagttaaagagttattcaacatgatgcagccagactatgttgaagaactaaagcaagaaaacggtgcagatcaggttgacgttcatgatatcacgtttagcgctaaagaagatgacactgaggctttcatcacaatgtatgacaactcaggaaactatcgaatctcaacaaatcttgatgtaagtggcttggatagcgagtacaagcaaacattaaaaagcattaaaggtattatagataagaaactttgagagtaaagtaaaggatgatgaaaatgaatattagagagtttattgctgagcagagaaaagacgaaaagttcttgggtttgagatcaaaattaagggaactaattgaacacagaagacttgaacttgttgaaatgcttggatataaaatcgatagtttgaatcaagagcaacttatagaattcaaagaaaaattcagtgaattaactgcatttaaagaaaaggtaggtaatgatcctttcagcattagtctggatgaacttggcgaacttctatgtttccaaaaaaaataaggaaggtagatacaaaactctggagtatgttttgagtaaaacgattgatccatacattgataaaccaaaacaggctacagttatttctagataaaatcacagtttcaaaggaaggggaagcaaaatgagtgcagcaagaaagtggagagatttgagaagcaaattaattggatataaggtctacggtaagttcagcgatgttgttattgaccatattctaaatgatatggataagttagacgtaagacatgacaaagataaaaacaaaaaataaagaaaagggagttgtggaatgggagctgctaaacagttatacgttaagcgcagtcactttgtaaccttggatgaagcaaaagaaaatacgcaagtacatatgaagaatggtggttcatacactgctttaaaaggagagctgattgcgactaatcttgaaggggatcaaatggttatcacacaagagcagaaggataactacattccagtaccaatgacagagttatcagattatgaagctcaaatggccaaaggctatgctgaaatgggagacattaatttagaaatgtctgaagcttttcatcatgctgaaaatgaagcagaaacaaccaccaacagtttggttaacggagaatataaagaatattgattattacatatgaaagcaagacaggcaatgtgaaaaggtttgctcaagctttacaaagggagttaaacttcgatgtcattgaaattacagatgacttaatcattgaagaagaatttatacatattacatatacgataggctttggggaagtacctgaaaggactttaaactttattattaagaataaaaataaaataaaaggagttgttgtgagtggtaacaaggtttggggtgataactatggtttagctggggacaagctctcagcaatgttccacgtaccattgttattaaagtttgaactaagcggaacaaaacaagatttgcagaagattaatcgggaggtacaacttattgacaaacacaataccaaagtggattaagctcaataatgagatcatgattcagaaagacggtaagtttcaatttgagaaggataaggaggcagtacacagctactttgttgattacattaatcagaacacagtctttttccatgacttaaaagagaaactggattatctgactaaaaatgattattacgaagaagaattcttaagcgaatacacatttgagcagattaaatcgatttttaagattgcttacagttacaaattcagattcccttctttcatgagtgcctttaagttctacaatgactatgcattgaagacaaacgacaaaacaaagatattggagagatatgaggatcgtgtctcaattgtagctttatattgtgcagatggtgattatgaaaaggctattgaggaagtacacgccatgatgaaacaagagtatcagccggcaacgcctactttccttaatgcaggacgtaagcgaagaggtgaaatggtaagttgcttcctacttgaagtgggagacagtttgaatgacatctctcgtgcaattgacatttcaatgcagctgtctaaattaggcggtggtgtagcattaaacctaagcaaattacgagccaagggtgaagcgattaaagacgtagagaatgcaactaaaggtgtcgtaggtgttatgaagctattggataatgcttttagatatgcagatcagatgggacaaagacaagggtctggagcagcttatctaagcgtattccacccagacatcacagacgtccttgataccaaaaaaatctcagcagatgaagatgtccgagttaaaacactgtctattggtgtagttctccctgataaatttattgaattggcaagagaagataaggatttttacatgttctatcctcactcagtctacaaagaatatgggaagtatcttgatgagatggaaatcaataaaatgtatgatgagcttgttgaaaaccctaaagttagaaaagcaaagggaaatgctcgaaaactgttagagcaattggccattctaagaagcgaatcaggatatccgtatatcatgtttgctgacaatgtaaataaagtgcatccaaatgaacatatttcaaaagtgaagttttctaatttgtgcgttactggagaaacacttcttttaactgagaatggatatgaaaaagcagctgatctttacaaaaagcagaatgagcttaaagtggtcattgataatagaacaaaagattttgcagttggcagcaaaggtacttcaatagtagatgcaattccaatgcaattgactaaaaaagatgcggaaatatttaaagtcaaaacgaagcaaggatatgaaataaggacaactgagtggcacaaattctatgtgaaaagggacggtgaaattcaaaagctccaattgaatcagctaaaaacgggcgataaattattagttcaatcaggtgagggagcatacggcgacattcatgagccagatcttgcttacatcatgggcattatagctggggatggaaccattactgaaaaaactgccaagatttatttatacgataacaaaaaagttcttgagcagaaagttactgatgcagttcaccgtattattcaaaaacacaagctcgatcgtgcttataaacacaatacatcactggctccaacatttaatatggctaatccagaaaaacaagatttactctacatgaatagtacagtcttatttgacatcttgaagaagttcggtatggacaaagaaactaaaacaagagtcccagaattcatttttcaagctaataaggaaacgcaagcagcttatttatcaggtttattccagactgatgggtgtgtaaatgcaaatcataaagccaaagcattaacaattgagttaacatccattcactatgagagccttcaggacgttcagaagctattactaaacatgggtgtttatacaacgatctattctaacaataagcgttcacaagaactccttcctgacgggaaaggtggttctaagctgtacaatgtaaagccaactcacaaaatcagtattcaagatagaaactcaagagagttgtttatgagcattgttgaaatgaaagaatacgatatttataaattcaatttgctaactgagacattgcaaccttcttcaagaaagccaaagcatgattttacggctgaaattattagtattgaagaagatggtgttgaggatgtttatgatacaacacaagaagactatcactctctgattttcaatgggattgttactggcaactgttcagaggtgctccaagcatcacaagtctcagtttatacagattacgatcaggaagacgaaattggtttagatatctcatgtaatcttggatccatgaacattgtaaacgtaatgagcaatcaatcaattgcttccacggttagaatagcaattgactcactaacgactgttacaaggaaaacaaacattgtaaatgccccagctgttgcgagagcaaatacactaatgcgatcaattggtcttgggcagatgaatctacatggttttttagctcaaaataaaattgcttatgaaagtgaagaagctaaggactttgcaaatacatactttatgatggttaacttctactccctgcaacgttcaatggaaattgcaaaagaaacaggggagacgtactacaagtttcacggatcaacttacaaatcaggcgagtattttgataagtacgtgacaattgattatagccctaaatatgaaaaggttaaaagcctgtttggagatcaacatattcctaacattgaagattggatgaagcttaaagaggatgttatgaaatatgggttgtatcattcgtataggcaagctgttgcacctactggaagcatctcatatgttcaatcatctacagccggtgtaatgccgattatggagagaatcgaggaacgtacatacggaaacagtaagacatattatccaatgccaggtttatcggctcagaattggttcttttataaggaagcatacgacatggatatgtttaaggtagttgatcttattgccactattcagcagcacgtcgatcaagggatttcatttacgctgttcttgaaagatacgatgacaacgcgcgatctgaaccggattgatttatacgcgcatcatcgtggcattaaaacgttgtattatgcgcggacgaaagataccggccaggattcgtgcttgagttgcgtagtttaaacgaaggggaggcggagtcgtgaagttagaaatcggtcaagagtgggtcagtgaaaagcacccacatgaaaactttaggatctacggaggagtagtggatacttgtgcagactcatttaaggacgaaagcataacattcgatgagcagccggaatgggctaaaattttcttctgggagcgggcggattatgcgagtttcgataaatacgtcgaatcaaagctaggaaggaatcgagatagtacgtatcctttcgctagatgtggagagacgaagaagtccggattagtagcaaaaatcaaaaaattcaatatggtcgttaaagagaaggaggatgaataattgacgcaatatacagcagcaaactggtcaaagcatgaagatgatttcacccaaatgttttacaaccaaaacgtaaagcagttttggcttccggaagagatcgcattaaacggcgatcttcttacttggaagtatttgggtaaaaatgagcaggatacgtacatgaaggtgctcgccggcctgacactgcttgatacagagcaggggaacacgggcatgccgattgtggccgagcacgtcgagggccatcagcgaaaagcggttcttaatttcatggcgatgatggaaaacgcggtgcacgcaaaatcttacagcaacatctttcttacattagctccaacagagcagatcaacgaagtgtttgaatgggttaaaaacaataaatttcttcaaaagaaagcaagaacaattgtttcaatttatgaagcagttcagaaaaacgatgatatttccttattcaaagcaatggtagcgtccgtgtttttggagagtttcttgttttactcagggttttattatccactttacttttatggacaagggaagctcatgcagagcggggaaattgtaaatttaattatccgtgacgaggcgatacacggcgtttatgtcggattgttagctcaagagatatataagaaacaaactcttcagatgcaaaaagaattgtttgaatgggctttaagcttgttgcaggagctttatgaaaatgaattggagtatacagaagatgtttatgatcaggttggtttagctccagatgtaaagaaattcatcagatacaacgcaaataaagcattaaacaatctgggctttgatcattggtttgaagaagaggatgttaatccaatcgttattaatggattgagcacaaagactaaatcacatgacttcttttcaatgaaaggcgttggctataaaaaagcaacggttgaaccattaaaggattctgatttcattttcgatagcaaaggagttatttcatgagactgattaaattagaacaaccgaattgcaatccttgcaaaatggtatccaattatttaaacgaagcaggagtcgaatatgagacatttgatgtaacacagaagccagaagtggcagcgcaatttgaggtaatgagtgtaccggtgactatactgctgaatgagcaagaagaagtaaagcgtagtgttggatttaagcctgaagaacttgatgaactactaaagggattacaataaaagataatttccttaggggagggctaaccatattcggttggaatattaacgagatttcatggtggaagtacatactgcttttaatttttttaattactgtaatacctttgttgataatggattggataaccttctgtaagattaagcatattgactggattattcaacgatattcatgttgggcggcctatttaatttttggatagatttttcacataataaaacaaaaggagaatgttaaatggggaaaatggatgaagtaattgttgtagcacctagagataaagtatttgataatgaagaactagtctttcaaggaattgaatctgatctaggcaaggttgatcaaataatcgaaaatctcgctgaaagcatgatcactatgaataggggagatgctgagagggatcaaagctgtaagcaaccaattccctatgccattttacaaaaaggagaccgagtatttgcatacgagcggttaagaaaaagcggggaaaagaggcttcatgatcaattatcaattggtgttggcgggcacatgaatttaactgaagcaacaaatttttgggaagctattgatgagaacttaaggagagagctttcagaagaggtgtttatctcaacttccaatttaaatttagaagttgtggggttgataaacgatgacttaaatgaagtggggaaagttcatttaggcataatgattattgttaaactgcctgaaaatgcagaggtatctgtaagagaaacagatcaattaaaaggcttttggttaaataaacaagattttgataatccattagtatttaatcgtttagaatcttggtctaaatacgtggcagatattatttattagtttaaacccctggctttgatcatgatgtttgtcagtggagggtctcagccagggtacaacttaaaatactcaaaaaactcaacaattatgcctacaaaggagatgctggatgaaaaaaagattacgcaaaaaggcgtggatgacagggaatataaaacagggcgaattcatgtttaatgtaattgataaggtaaatgcagatggacatgtatattatccaaaaggacactatcatgtagacaggaaagggaatatgtacaagttcaaaatttagaaacaagcgaaattgtgatgactaaagttgataaagatcttagggataccaaagggtgtcgattgaacgaacatctctataaaagaagacttttatttaaaataaagaggaggaaacagaccataaacaataacagtcataaagatttgcaagcaaagtatgatgatatgctcttcagaaacggactttgtttggggtttattcaaaaacaagggcttgcagatgtgtttttggagcatatgaaacaagttgcagcttatgaagaagaccaaaggtatagagttgcagcagttaattttttgagtttattagaatcaaattaaaacaaaaaggagatttgaaaatgaaaatttcaattaaaacaaggctaaatcctactgatcaatataaggttgacgactttattaatgcatttaagaacttgccgccagaaataagaattcagctttctatggacaacgggaacagttggctgttagaacaagtgtcagtgaaaacagaaagaatccttcttgattgtttacaagaagaaattaaaaatattgataatcaccctctttattctcatgccacttcattagggcaaactgtattccacaatactcatgaaattgtcgatgttgtcaaagagtatgtgaagaaaaatggataaacatatagagaaaatacaagcccatctaaaagaaatagaaaattttaaacaaggcctccaattattcagtgaagatgaagaagaatacataagcttattagctaagattcaacatcagtttgatttaatttcagacgaatcaatggaagggtttaaagaattaactttacatataagaaatacaggtcagaaaagaatccaacggagaattgatcagttacctcacacaatcaaagaaagtgtaagtgaagaaattaaagacatgaagagagccggcgagctttttgattgatatttaaattttaaacatggctatataaacagtgacaagtatcgattgggtgtgaacttaaatacaatacattgaaaactgtgaagaactggaggttttaatgtgtttagacaatatccaatatggtacacaccgtcgctgcatactttgaattacttgccacaatttacaccatacattgcccactttaatagtgctgaacgatgttttcaacgatgtatgtaccaaacgcatggcaatgttgaatggtgccatagaaactgctacgacccgatctatcaataaatttaaccagagcagttggatttaattcctctgctctaaaaaataaaatagggggatgtattataattacatactttacgttaatacttgcagcatacttatttgcactaaacattaatgaaattagattaattactcgaggggaacagaacgtatacgctaaagtcacacatttgctttctaactcaccatataaagaactgaagaagaataagaacttagtgtatgtcatgacattgttcaaggggatttcgttcattatccccttggctactattggactgattacgcatggtaacttgctaatgttagcttgaacagcttttgctttaatatataccggtttaacaatgtttaaaattcttgatgttttggacggtgactcaaacaataaacaaaacaagttcgtgtacatgctttttgtttgcggtaatattgtcttcgtggttaactttattatcagttggtttagataaaggagaatagaattatgactcagtttgatatgcagtacaacacaatcataaatgacataattaataatggggcatctgacgaagaattcgatgtcagaaccaagtgggatacagatggaacaccagcacatacattaagtgtaatcagtaagcaaatgcgctttgataattccgaagtaccgattttaacgactaaaaaagttgcttggaaaacggcaatcagagaattactttggatatggcagcttaaatcaaatgatgttgacgaattaaacaagatgggcgtacatatctgggatcaatggaaacaagaagacggtacaatcggcaaagcatatggatatcagcttggtaagaagaacagaatgctaaacggtgaaaaggttgaccaggttgattatcttcttcatcagttgaaaaataatccatcatcacgcagacatattacaacgctttggaatcctgatgaattagactcaatggcattgactccctgtgtctatggtactcaatggcttgtaaaaggcgggaagttgcatttagaagttttctgtcgcagtaatgatctcgcactcgggaatccgtttaatgtgttccagtacaatgtattgcagcgtatgattgctcaagttactggctatgagctaggtgagtatatcttcaatatcggagactgtcatgtatatactcgtcatatagacaatttaaagattcaaatggacagagagcagtatgaagcacctgagttatggattaatccagatgtaaaagatttttatgatttcacaattgatgatttcaaattggttaattataagcatggagacaagctttactttgaggtagcagtataatgctatctcttattgcttgctgcgataaatcaatggccattgggtatgaaaataatttgctttaccatattcctgaagacatgaaacgttttaaagaactcactacaggaaagttgtgtattcaggggagacttacatacgcttcaatcgtaaacattacaagaaagccacttcagaaccgaaagaatatcatattgactaaaaataaggatttcaagcctgatcactcttcatttgtttatcattcgattgatgatgtattaaagcttataagaggacaattggataaagatgaagaagtaatggtaattggaggaggtgctatatacgaggcattcttaccacatgctgataaggtttatttgacgattgttgattcagttgctgagaaggcagattcatattttcccaggttaaatgatgactggagagtaattgaaaaggatcacaggaaagcagacaacaataccacatttaattattcatttgtgacttactcaaaataattttagaataaaaataaaatagttatagactttttagaagttgaatgataagataaagacaagttaaaagcttgtcttttttttacatacttttagaataaaaataaaataataaataggagtggcgatatgaaaactgcaacagattatcttgtttccatttccaaacctcttgttgcaattgaggagactaaacaacgacttcaaaatgaaattgataacctttataaagagctagggaaagttgataaagagctcaatgaattttatcacaagctagaagaggacaaatttaatgcttcagagggatatcacctttcgttgaaaggtcaaaagatattgagaaagcgaagaagcttaaaacaagagctccaattactgaacacgcttttcggaagtttaaacaataatggatggactcttgaatcactgaagattgcagaatataaaattagcaaaaagaaaaacaagcatttacagtatgaatcggtttaaaaacaagcctacataattaaataaaaaagagagggaagccctctcaatgtattagtaattataatcccaataaacatcaacattaacttttacttgagctacactgtcattgttatgtgctcggacatacaattgttttcctgaaataagtgatgtgtttacgctaaatactttgtaaaattgttcactaatataatttccgccactcggtgtaacagaagccagcacagtgccatctgacttcattaattcataagtcacatttgcacttctacttcctgtccctgttgaccattgtttccccatgatggaaatcttggttacgttgtttggtgtaaagctagtgactactgttgcgtaagatgcagggcctgaagtagatctacctatgttgacttcaccaacaccatttttaacgtgagtatcagtcccaagagcatgaaaactaccggtgtttgttaagacctcaagattattttgaggggcggcaaccggctcacttttagcagtagcattcgctgacgcagctacaccagtaagaccaatagttgaaactaataaagcaattgctgttttcttcattaaaagcatctcccttggtttaggtatgtaatacaactatattataacaattaattttgaaataaatggagaatgttgtgaatatatggtgaattttctgaatggagtgtgaatttcttcggtgagaactttaaggaggtgatatattgcaacaaaaagagcaagaattgctgtcaaagaaagaacagcttgaaattgatgttttagaaaaggaagcagctttactccggctagaagtggaacaagaagattccaatctccacaaaattggggagatcggtgtacttaaagaatttcttttatacataaagaaatacagatcaatgtttactgtgcagcaagcagaagaatttagaaatatggatgaccgaatgaaagaaatcatcaaagtccaggttggacaagtaatggttgatgaagaagctttagagggatttattgaggaaattgagaatcaaattaattgaaagtgggagatgaggaatgaatgaaaaattaacgaaagatcaactcgaagaaatccgtcaacgtatggaagcgacaaccaaaggattttggcatgcaaacattcaccatgaatggccagggaacgaaaatcttcgttattggatagttactcttgaggatggtttagcagctgcagtaactaaagaagacgcggacttcatcgcaaacgctcggcaagacattcctaggcttctcgattatataactgagcttgaaaggaaacttcagaaaaaagaatatgaacttacagagtgtaatcgtgtctatttagagctgttgagtaaacaagagttcaaaacaactgaaatctaagtaaaatctgtattttaaagagaaggtgatgcagtgaaagagtcgttgaagaatgattttcaagagtttatgagtattgcaaaaagctttcttgctgtttctggagcagtcttttggttattgataatttcactcgtttttgctgggggctattaaaatgaatcaatcatataaagttagtctagaaaaattaccaattgaaagcttagagagactgaaaacagacatacaaaatagaattaatgatggattgcgtaccgataacaatgcatacataaaagaccaaagaagaaaacttcaaatcgttttaaacgagctggttagacgaagtacatttgttcactaaaggaggtgaatacaatgccagtagtactttatggatttggaagaggagcataaaaagagaggggagtaatcccctcatacattaatgaaattggccattcatgctttgttgggctaggcgaactaaacgttttgtgatttctccacctactgaaccgtttgctcggctagttgtctcaggccctaagttcacaccgaactcagaagcaatttcatacttcatttgttcaagggcaccagcagcttgaggcacaagtaattcattgctgttgtttgatctgttttgttgagccatatgatcatctcctaaagttgtatgtaaacaagcttgttcaattgtattgtgtggagatgttttgtaaatatacacattaatttaaagtgaggggatttaaatgtcaattggtcatggagcatgaattaacacgtacttaaacaaagaagggggataaaatgaaaatcgattatgtttcagatctgcatattaatcactggataccttgggacaatgaccaaattaaatgggaaaggcgaacaagggagattattagaaggctgatatcgaatggaaatggagaggtattaatcattgccggtgattttactgagtggaatcaacagacactgtgggtacttgatgaagtagcaaagcagtatgaaaaggtttacttcacatatggtaatcatgatctttatttactcagtaaaaatcagcaacgaaaatattccgattcattgggaagggtgaatgatttaattcagaaggctacagacatcaataatgtcactccattaataaagtctacggatacatacaaagggaaagtctttgcaggagatgttatgtggtatcttccaaaaggaaatgaaggatgggatttcttcaaaggtgtctctaatgattcaaactatatcagccttaatggatacagcaaagaagatggggtacgagcaatgtggaaagaatcaatgggctggtatgacactcttgaaaactctcacattgatgtatttgtctcacatgttccacctgttcacaatccttattctccgtttgagcctaacagctgctatatggttgatgtcccgttcattaacgcaaaacattgggtttgtggtcatgatcatttacaagctgagtttgacaatgatggaacgagctttcacatgaactgcattggatatccatatgactatgatatgtatcctagagtaaatgagataccaggtaagcaagttgatacgtataaaacgtttgagctgaagacatttgaaatcaaatgaaattctaattttatacagaagggagaaagtaaaatgtctaatgtgaaaattaaatatgttacagactgtcatgacaaagagtttacattaaataaaaaatatgattttcgtataaccgatgatggtattgaaatcattgatgatttaggtgaagaacatatcattgcaactaaagacaatgaatatggggcttatgaacacgatgaatttttcagatcaagatttgaatttgttgatactgaataaaatgttgatttcatttagaagggataagttcaatgaaagagattgaatttgatgaagttaagaaatttgttgaagtaatgtctagagaatttagatcaacaaagatgatgaaaattaaaattagctatgctgaatggttagttgatgaagttgaacgattaaggggttagtcaaaagtgagcaatagtttagagagaaagattaatattcatttcagtaatggctcacatatcgagtctaaacaactttctaataaactaagggggtacaatagcaatttcttatgggagcaaatgcaagagagtatcacaaaggaacttaaatggtggggagtcactctaactggaaatcagaaaactgtaaaagctttaagtgagctaatgaccattaacaaaacattgtttgagaacctttataaggtgcaatcagacaccatagaagagcttgcaaacaaattatatgaacaggttcctgagtatgagaagaagtttttgaagtttgtcaatgaacagatacctaatctgaggatgtgcctacagttcgagctaccttataatcctcaactaatatccagcatagaatatgaaatttacatatccggtgccgaaattgattgcgaatacccacatgatgctagggattgcattattactttctttcaacggataccagaaataatcggttcatacaaggaggaattagatgaagaatacagagtttaaggtaacaagtttattagaggagtataaacgaagagatgaggaacgtagggaattcatcattcatgaaggctacagagctatcgaagagatcattaaagaagtgaaccaaagaggatcactaaatgaagcagatatttattatggaacacctaaaccacagttaagcttctcggacgtcgaattaggctacatgcttacttctatgatggaatatgctacaaatcatgttggaaatccagttgatgaggaatgtgaacttgaaaataagctggcttactttgagcataaggacgaaattgttcaagtttttgaagtatatggacaaggtactgacagctggtttttgaaaccaagtgacgataccgtttataaattgaataacacagcttacggagtgtatttaaaccagttcgatgatttcattaattacactaaaaataaagacaatgagagtaaaaaggtttcttatggtaccacgatcttaaatgacattgccggcggatatacagttggaagaggttctaagtagatgatcgttacagcttggattttgtttgttgcatttgggcttgttttgttagcaagaatggattccgaagggaatcttaaatttgcagtgtatattggtgtaattaaatttgtttcagttttcattgttgccattgcagcaggagtgatttggggagggttatttcaatgataaagaggattatgagttttaagtttgacgactggagacatattttctacttattaaaaagtgtagcgaagaatttctttaaaggtgattttcatgaagcgagcgatgcactttattggatacgggtacacttgtcttttgaatcaaataaggtgaagtgaacattagataaaatcggtcatttatttagagtaaaaataaaattagatgattagaggtggagagtaataactgagtacattaagaacattcaaatactgttcaacaaaatggaaagacaaatgggtacggtgaaagaagctctcgagaacaaagaatacgaaagagcccaccgtaacctaatcaacctttcggataataatgaagaattgatgcaggaaatcagatgggctcggaaagggattaagatttaacttttcttctttcttcgtggttccattcgtacagctcttcaattgagcaaccaatggcatcagcaaaagtcatgccagtagctaagttcatatttgctttagctccacttatataatcgtggatacgttgtctggggtatcctgtacgtttgaaaaggtcatcaactgtgaggtcatattcaaacattaattcatttaaacgagggcgcaggggtgtccattgcttcatttcgaacacttctttcaatattaattaacataaaacagtgtagcaaaggtttattctaatttcaattttagtttcaatattttaggagagtgattgattgggaggtacaaaccaaggcaaggtttttgaagcaaatatagaaaaatcagctgcaggtcaaaagctgttcttctatagaattaaagatgttaatccagtgtttttaaaaaggggagctgcagtatcaaaaaacaaatatgattgcttcttgcactttaaggggtacttattcccattagagcttaaatcaacaaaggataagtctattgcctttcaagagaagattataaagccgcagcagataaaacacttaaaagaggctacgcaatatccaaacgtaatccctgggtttctatttcaatttagagagccggaaaataaagtttatttcgtacatattaatgatttccttacatataagaacatagctgaaaaacaattgaaacatacatataagaataaagtaaacaaagccagcattccaattgcaatttgtgaagagatcggcacagaagtccgttcgatgaagaaaaaagttaactatacatattacttgaataagctttgcgatgatttgattaaaaaagaacagcagagtgtgagcgctgtatgagtgaattcgttaaatcatcttcaaagcaatcgtttgaaatagaaaaatatcatataacgattgaaagcataaatcaaccatcagctgaagcaattaagaaagtcaacctaaaagtgaatgaagtaatgtctaatttattagcaaaagaaaagagccattaagccggctctttttttgttgtacttaaactataatacttgtgacgattatcgggatgaccttaatgccggtcgcgatgaatcatattgccggcggggaaggcagcaaggatttcggtgatccggctaaccttgccctcggatttacggtgcttgtcatcatcgtgctgctttatcggtttacaaaaggatttttgaaatccatttcaattttaatcggcattgtcatcgggacggccatcgcatattttatgggaaaagtgcaatttgacaatgtggcgaatgctgacgccattcaaatgattaaaccgttttatttcgggacgccgacatttcatgcggcaccgattattacgatgtcaatcgttgccattgtcagccttgttgaatcaaccggcgtctatttcgctctcggtgacctgacaaacaggcgcctgtctgaacgtgatttagcaaaaggctaccgcgcggaaggtctggcggtgttcatcagcggcattttcaatgcttttccgtatacggcctattcccaaaacgtcggcctcgtgcagctgacggggattaagaaaaacgcggtcatcggtgtcacgggcgcacttttaatgctattcggcctttttccgaaaatcgcagccttcacgaccatcatcccgtcttcagtactgggaggcgcgatggtggccatgttcggcatggtcatttcctacggcattaaaatgctcagtcaaattgactttaaaaagcaggaaaatcttctgatcgtcgcgtgttcggtcggattgggactcggtgtaactgtcgttcccgatatgtttaagcacctgccgtcttacttaaatctgctgaccacaaacggaatcgtcgccggaagctttaccgccgtccttttgaatattgtttataatatgattcctaaaacgaaaaaaacccttgatgtgacaagggttcaagagggttagttatccgtttttcttaaaaaaataacattttaataacatttctttatgaaatcccgagatcgaggatgcttccgaaagtttgctgaactttttgtgaggcatcctctttttttattagtttcattgtttgaaaagaaataaattgagtgatgcggcatccgccttatttcgccgaacaaccgtcccgaactatatgtacgtgaacatatgactgaatgtaagaaaaaaaggagaatgggggatcatatcataaacgaatatcattgttcggacggtgatgacacgaaacttggtttagacatggaatgaaatgcctgatgccgaagtgcaactgcagaatgggcgctgagggggagtgtcttgtgcacggatccttacaaaagagagtgaaaagaaggggaagccccttcttttaattaatccatccttcaaaagttgcgcgatagaacccttcgattatctctactttcttaaggtaataagtaacaccatttttaacagttgtatttgggatatcccatctatgaaggtaatccattgtaaaagaatctttgatcgcttgtgtcgaaatttttgtttcagttgagtcgctatttgtattgccagggctggatgcaaaagcaggggaagcggaaacgagtaaagcgagagacaaggcagaaccagttaaaacttttttcaatttcattttaaacactcctttgttttttaatacaattgtattattacacaaaatacaataataaccaagaggttttttgttaatattttgtgggcgcagcgtgaatttttttaggggagtggatggcaaaaggggcaatcctttcatccgctgttgcagcttatttcaggatactgatatgtatatagagaaaaagagttgattattgctggcctctggtgagctgcagcctttgagtgagtgtttgatttagctattccagcgcttttccaacgggaaaggtgtgatatgaaatttaaaactgaaacaattgtacaaaagtaaaaactttatttaaaatgttataaatactaattttcaatataggaggttatctggtggcagaaaagaaaaaagctttaatcattgtggatgtacaaaaagctttcgattataaaaaatggggagaacgaaataacgtaaaagcggaagaaaacattagtaaaatactgaaattatggagagaaaaaggatggacagtcatatacatacaacatatttctgataaacctggttctttattttatccaaaaaatgagggggttgctataaaggagatcgttaaacctatggataaagaggtcattataaccaagaaagtaaacagcagctttatcgggactaatctagaagagattttaaaatcaaatgatataacaactgtcgtaataactggtttgactacgccccattgtgtttcaacaactacaagaatgagcggtaatttagggtttgatacctacctcatttcagatgcaacagcagccttcggaatgaaagaccaaaatgatacatattatgatgccgagactattcacaatatatctctggctacattgcatgacgaatttgccacaatattaacgactgatcaattaatcaatgattttataaaaacaaactgattaacattatagctaaggccggcggtgggtatagcggctgaaaagcatattcaggcgcatacaaggatctcgtctgaaaaaaggcatctgcttcagatgtttttttgtttcttgaaaaacgggctggtaaaaaatgatcggcgcggttaacggtctgattcggctttggttttgaataacaaaaggttttactaatcagcgaattattcaagattttttggcttgtgctgagtctgtgtcttttgatttcctcgaatagattggcttgatcatctttttgtggctgaggctctttgttaagacattttgggtcgatcacatttttaaaatctttgatggttaaaggcttacagtcatcttttaattcgtagcctaattgtccattagcttctaaagtggcatatttaattgaaatgccaagaagccttaaacgcatttcgagttgatctgctgtcagtctcagcttctttaagttttgtatattagttggccgtcttctatatcgaatttagattttccggttaaaaaaaatcaatccagtttacttttacttgaaaccattccatcaaaattaaagcactaaaaggatagacgcagcgattaatgttttcaataaactggtttctaaaatgggatgaacgataatcgtaccgattgaaatcatcaccattgtctgtgcgatggtcatttgtgcaatggattttctccctgaaattctcagtaaaatcattccgaatgcaattataattaattcttcccaagcaaatctcatgttatcaccctagattgtgttttatcaaaaatgaaagagcaagtaagaggtttcttaacgttagctggggaactcaggcgtcgataaaatgttctggattgatagagttgagactcggcttttggatagacacgcgggagagaattttagtttatgtgtttttgcgtctaaaagcagaaacattacaactaataatgatcatcggatgtaataaaattacgcacctaggtgctatatgctggatcaattataaaatggagtgaaactaaaaaaaggggcaaagcccccttatattagcagctttttagttgttacttgagacaatcattccgccgtcatgaaaaatcagcttttgtagacggctgtccaagtgccatcagcaccatggaaggtgatgttgtctaaataataggtgattccattccggtaaattgaagtaggataatcagggccataaccattaagtatgaacgtcgccaaagcagatacttccttcgttttgctttctgcagaaggtgtatcagcaggacctgcggcaaaagcagggcggcagaacagagtaaagcgagtgacagggctgagccggctaaagcttttttcattttcattgcaaacactccttttcttttttaatacaattgtattattacatattatgttaaacatgtacatgcctatctttgttaattttttgtgaacaaacagataatctatttaaacgcagagatgtaataagtatgatgatgaagcaattatcatctataaaaataagatcagaaagcagatgattttctcgaaaatcatctgctcttgcgaaatgaggagttacatgacatttacggaacgggcggtagccattatcaaacagattcctgaaggaaaagtgatgacgtatggtcaaattgccggtcttgcgggaagtccgcggggagcgaggcaggttgtgaggattcttcactccatgagtaaaaagcatcgtcttccttggcacagggtcatcaatgcaaagggtgaaatcggattaagagatgaagagatattttctgtacagaagctgtctcttgaagctgagggcgtagcggtcacgtcagacggacggatcgatctcaatttatacgtccatgatccgaatatgtaaaaaacctgccgtatatatcggcaggtttttcagttatatgctgcaagccggccagaaaggttttgccggatataaggccattcctcccgaaggatggagtagtaggcggtatctctgaggccgccgtcgacagccggaatatgcgcgcggcggatcccttcaaattgggcaccgatccgcaaaatcgcagttcgtgagcgctggttgcgaacatcggttttcagcgtcaccctgacagcttgccacgcgtcaaacgcatgggtcagcaacagaagtttacattccgtattgacaccggtccgctgtacggcagaggcataccatgtgctgccgatctcacacacttccggggctgcgtccgccggccgcgtaaacacttccgcatccataaaccgcgtacttccgacgattcggtctgtttcaagattccgtactgcaaatggcaatgcaagtcctttttcataatcggaaagcgtacgttcaatataacgctttgtttcttcgattccgtcaggaacatgggtgtaagcgtaagtcgtcctattttctgaagcagcttcacaaagtgcctgagtgtgatcaatcgtcatcggctctaactgaacgagtgaccctttaagaatgacgggcttcagcattcttatcacaacctttttttatgaatggatcaagtatagtcgagcggcttatcattcaaaagggccaattttaaattaaaatggcatgtcagtgaaatcctcgcttcaaacttatgcatacattcaggaaaaaagcggaaacctttatgtgaagaggtgatgggcatggcatatgtgttatcggtcggaaccagcattccggaatatcatgtctcgcaagaaacggcggcggattttgcgagagggatgtttgccgattcatttaaggatattgaccggctgttaaaagcctttcaaaacggcgaaattgaatcaaggcagtttgtccggccgattgaatggtataaaacggcgcggggtttttcagaaaagaaccggctgtatacggaagaaaccgttaagcacagtgcggatgcggcacttgattgtttaacaaacccggattgtttaacaaatccctttccttatgaaaaagtggatgcgatcttttttatttccagcaccgggctttcgacacccagcattgaagcgaaagtgatgaatcagctgccgttttctgcgaaaacaaaacggataccgatctggggcttaggatgcgcgggcggagcggccggcctgtccagggcgtacgaatactgccgcgcatatcctgaagcatacgtgcttgtcatcgcggctgaactctgcagcttaacgtttcagccgaacgacaagtcaaaaagcaacttaatcggaacttccctgtttgcggacggaattgccgcagtactagtcggaggagaaaaggcgaaccgaaacgacgtcaaacagccgcttcttccgcggatattcgccactcaatcggtgatgatgccggatgcggaagatgtgatgggctgggaattcaccgacagcggttttcaagtcattttttcaagagatattcccaccctggtttcacagtggctgaaggacaatgttgatgaatttttaatagaatatggtgtcggtcctcacgacattaaaacctttcttgcccatccaggcgggaaaaaggtcattgacgcctatttaacgagtctttcaatggacaccggtcagcttgaggcatctcggaaggtgctgcaaaaacacgggaacatgtcttccgcaactatttttcatgtgataaaagaacagttgctccgcggccggcagaaagaaaacgaaaaagggctgatcggcgctctcgggccgggattttcgtctgagcttttgctgttcagctgggaaaagggggcttcttaatgttttggctgtttatcatgctgcttgcggcccagcggattgcggagatgatcgtggcccggcgcaatgagcagaaggtgaaaaagcaaggcgcagtcgaatacggagaaggacattatctctttctcgtcctgatgcacgtgctcttttttgtctctcttacagctgaggtggcggcgtttcaaaaaacgctttctccaaggtgggccgccattatatgtattattttatttgtacaggggatcaggtattgggctctattatcattagggcggtattggaatacgaaaattcttgtcgtgccggatgcggagcttgtcagaaaggggccgtacaggtggatgaagcacccgaactacgcggtcgtcatcttagaatttatttttctgccgctgttatacggagcgtattggacactgtttctcttttcgattctcaatgcctgcatgctcactgtaaggattcgcgccgaagagaaagcgctagaagaaaacaccgcaaaatagagattgaaaatcattctcactcatgataagatgtaaatatgaaaatgattctcattcaaggtggtgccgaaaatgacaatgttatttttatttgcagccgtttgtacatacagtgttttaattggtttcgtattgaaaaaagtttcgaataaatcgatgtcttcttaaacatctgcggtttttaatgccgcgggtgttttttctttatcagctgccgatatcggcggcttttttacgtttcctgaagaaaagtgggccattcttgtgtaaaatgggggagaggtttttttcagagctttctaaaaatgaaaacgtcatttgatgcgacagacacaaaggggttaagacacatgacagaagaagaacgccataacagggagattttcagcagaacgggtgccttatacgtacaattattggatcaccaggatgaaaaacgggccgatcagctcgcggccattatgaaaaaagcggctgatgaagaggtttatatcgcgtttaccgggcattattcggccggaaagtcctctttattaaacacattgctcggtgaagacatactgccgacaagcccgattcccacaagcgccaacctcgttgtcatccggcacggtgaagataaagtcgtgcttcatacgacggacggggcttatgcagaaattaaaggaagttacgataaaaaacaagtgcagcaattctgtaaagacggtgagcaaattgaaacggtggaagtctatgccggctttaaggagtcagagccttatgcggcctacattgacacaccgggaattgattcgacggacgaagcgcattttttatctgccgcttcggttctccaccaggctgacgctttattttacgtcgttcattataatcacgttcattcagaagaaaatatgctgtttctcagctccatcaaagaccgtattccgaatttgtttctgatcgtcaaccaaattgacaggcatgatgaaaccgaaacgaagtttgaagagtaccgcaggcaggtggaagatatgcttgaaggcgcgggaataccgaaagaatcgcttttctttacgtctgtcactgagcctgaccatcctttaaacggcatggaacagctgaaaaaacatctgcagaagctgaaacagcaggcaaaaacaaatttatggtccttaacggagagaaaagtcgcacacttagtcaaagagcatacagagatgctcgtaaaagatgataaaaacggaagcggagagcagtttgacaaacaagaagcacttgtccgttctgttgaagatgagcttaataaagccgttcaacaggctgaaacagcagagaaagacatcagaaaagacgtgcagaacatattgcaaaacgctaatttgacaccctttgagatgagggagcttgcatctgcttatattgaatcacagcagccctcatttaaaaccggattattcttttcaaaagcgaaaacggctcaggagaaagagagaaggcatgctgaattttttgccgatattaaaaaaagaacggaaggggaagcggattggcacattatcgacacatttacgaaagcggccaagcggtatgaagcggattcggacgaactgatcaagaaaatccaggcgtaccgcacaccgctttctgatgatatcaccgctcaggcccttaagcagggagcggccttttcatctgaatacgtattaacttatacgaaagacctcgctgagatgatcagaagggaagccaaaagacagacagcggaactcattgagaagcttaccgcttatgttcaggcaaaaaacggaccgctcattgagaacttgaaaaaccggctcgaaaaagaaaagaagataagggatgagctcgcgcaatcggcaaaagaagaacgcaatgccttggaaaaagcagcccgggtccgcgctttgtgggaagaagaattgacctgtgatacgggaagcggcgactggtatacgcgaaaaaaacgccttgcaaaagcgcccgtccaaaaagagaaaccaaaagagactgtacagtatgaagtaaacaaacccgaaaaaaatgcgatgaaggaacttcctataaaagagcagactgatcggttctatgagcttgccgggattcttgaatcctcgagcatattaggaaaacaggcagaagcctttcgaagcaggattgagcggcttgaaaaccgccagtttaccttggcgttattcggcggattcagttccggtaaatcatcatttgcaaatgcgcttgtcggtgaatacgtgcttccgtcatcaccgacgcccacaacggctacgattaacaaaataacgaaaccgcaagccggcaaaccgcataaatctgcggagatcgtttttaagacggaggaggatctggacgctgaaatgcttcagctgactgagctgaaagacgctgatgtaaaggggcgttcactgaaagagagatggaattatgccattaaaaaggggaaagttccggatgaacttatcccggtgattcagacgatgctgcaggcgtttgatacgtatgaagaacagatccgtcaaaggcagacactgacggtgccggtggaagatttaaaaccgtatgctgccgaagaaaaaacggcctgctgcgtaaaagaagtcaccgtgtattatgattcgcctctcacgcaaaaaggcatcacaattgttgatacgccgggagcaagcagtataaacaagcgccatacggaacttgcctttcaatatataaaagatgctgacgcgttcttttatatgacgtactatcagcattctttttcaaaaggagacaggtcttttctgaagaaactcggcctcgtcaaagaatcattcggcatggataaaatgttttttgtcattaacgccgccgatctggccaaaaccgaaagcgagctggaaaccgtcaaagactatgtccgctcagaactctcaaaagagggaattaaccggccaaaattatatcatgtctcaagtaaagaagagcttgcgggtaaaaaagcagctttttataacaggttctctgatgtaagaaccggacttgagcactttattgaggaagatgtaatgagggccagctgcgcccagctgaaaacagaggcggacaaattgtgcgatatggtggaacagcttcacgaatctcttcaccagtcggcagaagaaaaagagaaaaagaaacagcatctggagtcttcctatgaaaaagctctcgctgacatttcaaagcgccgtacgtctgaggtcatcattcgaaaagtgatgaaagatacggaagaacagctctatcacattaaacatcgcctgacattttatgcgaatgatatgctgaaaaccgccttccatccgggccttcaaaacggcgattggaaacaaaatatagcagcggcgctgaatgaagcgctcaaggaattccgttttgaatatattcaagagctgaaaacgctcgatatccggatgaccggttttattgagcgccatatgactgaggaatggatggaaaactgtcagaagaagcttatggaagacggagatttctccatttatgtgagcgccgaaaacgaatttgccgttcagctgaaagaagtcgctccggtcattgacgtctcggcattcacacatcacataaaagaagttaaatcgccgaagcagttttttgaacagaacggaaaagcagcgtttgtagaagggctcaggctcagcctgcaaaaagtgacagaaaagtggcttgagcaggagaaagaaagcctttcagagcgatatactgagcaggtgcgccgtctgcaagaagacatggcggataaaagcctgtcccagatccgcgagcagcgggacacttatttacaaggtcttgcggaaaatacgagtgcaagggaaattgaacacctttacgaagccgaaaaagcatggaaaaagaaagatgaaatgctgaaaatttaaaaatccggttggcgggcagataacagtcgtggtagactaaaatgaaaaaagcgagatgaaaccttttatgtcagaagtccataaagcaatttcagcacattccgcaaaacagcatcagcacgtcaaaacatttgtacagcttgactaccagcgtgaacaggccattgaagaagccattgtaaaatgcagacagaatgaaccgttcacgacagatgccatcaatggcattaccgcaaaaatgaaccagctggcgaaaaagggcatcgtgccgcaaagacgattcgtaagtgaagagatggtgaaagaattcgtcagcagacagtaatggatgaacctgccgcgtgtgtcatcagcgcttgctgtacatactatccgtatcttctctaaggggggatatgacaatgggcagaacaaaactgggaaacagaaatgttcagcagaataacaatgccaaaaagaaaaacggtttcggacagaaatttgattcttatgccggccgtgaagctgaaaagctgatggcaagcaataaaagacacggtgagtaacgtgacggcagcatcttccaaatggggggatgctgtttttttaccgccttctttggtaaaataggaacattgaataaaaaaaggagtttcgatatatgaataacaaattactgctcgtggacggcatggcgcttttgttccgctcgtttttcgcgacggccgttcatcgcaattttatgataaatgaaaacggaatcccgacaaacggcgtcaacggttttttaaagcatctcattacggcggttgatacgtttcagcccacacatgtcgtctgctgctgggatatgggaagcaaaacgtaccgcaatgatttgtttcaagattataaggccaacagaagcgaaccgccgcttgagctgattccgcaatttgatttagcgaaagaagcagcgcgagagctcggttttttaaacatcggcataaaaggctatgaggcggatgactgtatcggtacgctttctgccctattttccggagaagcggaaattacgattgtaacgggtgataaagatctgcttcaattgatgaatcatcaagttcaagtagcgctgctgcaaaagggtatcggcaattataaggtatatacagatgagatattcagagaagaaacgggggttccgccaaaagcgctgattgacattaaggcgctgatgggagacacgagcgataactatcccggcgttaaagggatcggggaaaaaacggcgtacaagctgatccgtgaatacgaaaacatagaacggttattagaaagcctcgctctcttgccgaagggccagcaaacgaaaattcagcaaagcttgaaagaattggagctgtcaaggcagcttgctgaaatacattgcgaggtgccgttagtctgtacgcttgaagaagcgattttttcattgaagatggaagaagcatccttaatgctcagacgccatcagataaaaggaattgaaagaatgctcgaaaagctgaacgccagagagatcagctgatccctctagcgttttgtattgcttttttttgcgttgttttcaagggctgatttcgggtctttatgcgcatttccttccatatttccctgaggattcacgcccccggtctgccggcctttattttcttttctcatagctgttcacctcatttgtaggatgaacagtgaaacgcaatttcattccggttatttattcagccggaccgctttttttgcgagctgatcggctgtttggttttgtctgccgggaatccacttaatgaaaaacaatggaaatccggcctttaagcggatgatttcatccacaaacggctggaaagccttgtttttaaccgcttcaagttccgcggcccgctccacgatatctgaatccgtccggaatgacacggactcaaatccgcgggcggcacacagcttcattccttcaattaaagcgagaaattcagcttcctgatttgaatggtcgccgatcggaattgagaaagattctgttttcccgtcatgtttaataaaaataccgataccggaggggcccgggtttccggcgcttgcaccgtccacgtaaatttcagcaggcatcatccgtcactctcccttcggtgtcattcgttttgccgcatacgcataagggacagaaatgagtgataccgcaaatttaatcaggtaagtcgaaataaagatgctgaaccatacgcccgcggaataaacgccgataaaggccacggcagtgaagataaatgtatccagcagctggctgagcgccgtgcttccgctgtttctgagccagagaagcctgtctgaaggaaagattctccgaatggctgaatatacataaacatctatcgtttggctgaaaataaaagccaagaggcttccgagtgcaacacgcggcagaaaaccgaaaatcgtctcaagggcaggctgcgcgatatctgacgcagccggtttatataaaagagccccctgcatggcgcatgtcaaagcgagcaaagtggaaaagccgagccagacggctttgcgcgcttctctgggaccgtatttttcattcagcacatccgttgcgaagaaaacggtgccgtacatgatatttcccagtgtcgccgtaagcccgaacagctcaactgttttgacaacctgcaagttggcgcacaccgtggcgaaaccgatccatacgaataggcccgttttgccaaatcctttataaaacagaagaacaatgataaaatgaatgaccgcaaataagatccataacacatcgttaaacaaaacctgctgacttcctttcaatttgagaatggtttgattatagcacacgcccgtcaactaatgaatggtaaggtgatttcaatgaatcttaagccgtatatcgaaatagaagcaaaaggaacaggccctgtcgcgtttttttccgaagattggctgaccgttccgaaagcgcgcatgcttgcaagagaagtcagccgctttccttatataaaagacatttattttgaggatgaaaaaggcgcgagctggacgcttaaagaattagaaaagcttactgaagaacttgcgtacgaacctgacgacattacagtgtatttcgacggcggctttgacaaaacaagcggacgcgccggactcggaattgtcgtgtattattctctcggcggcaagcggcatcgcatacggaaaaacaaaagcttaacgcttcagacgaacaatgaggcggaatatgccgctttgtacgaagcgcttaaggaagtgcaggaacttggcgcaagcagaaattcaatcacgataagaggggattccctcgtcgttttgcatcagcttgacggcagctggccgtgttatgatgaaacgcaaaacgaatggctggataaaattgaagcgctgctcgaatccttaaagctgacaccgacatatgaagccgtaaaccgaaaggaaaatcaagaagcggatgaccttgccagaaaaattctctcggaccggcagattgaaagccgcataacattagaaggtaacggagatgactgatattggataaaaaaagcatttataaagaattgacagagcttcaggatgaatattgcaaagactgtttcgtaaaaaagcatttccgcaaagagtttggaaaaacgcacgctcattctttctgcatcaaccaatgcacggtgggggagaagctgaaagcctacggcaaggtgctgacaaatcaataaaaaataaaaccgcagcttctgcggttttatttttcgaattcatcaagctgatgctggcaatcgtcgagaagcattcgctgcttttgcagaaaatcctggtcgagagcttgcagttcactggattgtgacatcgttctggcatcctgaatcgcctggtaagcagactccaccaaagttgaactttggccccgggtagccgctcccgttgttttctgggccgtttccaccgctaattcaagctggcgtttatccgtcagtccgtttggaaaaaattcagagtccattaaaaaacacctccgcaaatagtttggagattttttttagaaatatgtacggaaaatagaaaaaaatatagaaaataagccgatataactattgaacctgattaattagggcttatttactattattcagggtatcttgggagagaagggaaaaaccagccgtgaatgataatgatttaaaaacaatccttcagcagacatttaaagaaatatacggtgatctgggaagtttagcggaaatggcgaaaaaaggaatgccgtcaatggagaaacaaattgaagaaatcgagcagcgctgtaagcagaatcttgtcgcaattgagattcagacggcaatcaaataggagaggcatacgcctctcctctatttgtcatctgatcaacatgtattgagtttagagttttacaacattagaagcttgaggtccacgattaccttcgacaatttcaaaagaaacttcttgtccttcttctaatgatttgtatccttctccttcgatagcagtgaagtgaacaaatacgtcgtctccgccttcaacttcgatgaagccgaatcctttttcgttattgaaccattttactttaccgttttgcatattgcttaattcctcctagtactgtagcaccttcgtgctaaaaaaaattttgtcatcatccaaccgtacgtatgtaaacgttgttaaatgatggttcaactatacaccatatgggagcgggcgtcaagcggccgctccctattttttatctttatttttccagtaacaaagcttaaccggaaaaaaacaaaaagcacacgaatcgttcgtgtgcttttcttttacgataatgccatatccgccttcccggccatcatttcagattcttttataatgtcctgcaaaatgacttcagaagagttggggaggtgaaggcttttaatattgctcttcatccggttcagcttctcctcatccgcaagaagggaggtgacagactctaaaatttcttcgtggcggttgaccacgacagccgcaccgcgatcttcaaagaaaatggcgttttccttttcctgtccgggaaccggtttgtacaaaataacgggtacgccgatcgccgtcgcttccgtcagtgtgatgccgcctggttttgtgatcatgcagtccgtaatacggaacagctcgtcaattctttctacataacccagcactttcagccggtcggcattgtcaccttccaagctgctgagggattctttcagcgagctgtttttgccgcataccaccacaacctgcacctgatcgtcatgaacgagattttcgcacagttcttttacgtttttcagcacaccatgcgctcccgccataataagaagaacttttttgtcgggagagagattgtattttttataaatcggctctttcggcatcgattcctcgaattgaggcctgatgggaatgcctgtgatctttacgttgttcgggtgagtgccgatttcaatcagtttttcctttacgtaatctgtggcgacataatatttatcaacattttcatgaacccagattttgtgaaggcagaaatcagtcattacgttgaacgtggggatcacttttccggttctccgtctgtattccggtacgacaatcatcggaaatgtattgataataatgtccggcttatgctcttcgacgagctggcctaaacgtttatttcccattttaaaataaatattgaatttgcgtttattatagattttgtcaactccgtaataaaacaaacgataaaactgtttcccgattgagaagctttttaaataaaggtattgagtaacctctgaaacaatcggatttgactcttgatacaaattggaaaccgtcacatctaagccgagacgcagacattgttcgtagagcgttttggccacttgaacatgcccgtttccgtaatttgcagtcaaaattaatacttttttattggtattcaagtaaattcacctcaatgtaatcaacaacaagcaagcttcatgcatcgtaaggagttattgtctatagataaacataacacaagtgcatcattttataataagcgcgccaacatatttaaactaaatttaattgatatgttccattattttaaagttttgttatacgcatactgaatcaagagtattttatcatatttttgtcaccgtatcacttaaaacaaaaattaatcccattcatacggagtttcctgatatacgtaataattcagccaattcataaacaataacgttgcatgagctttccagcggttaacaggttctttcccgccgggcgcaaaatagtgcttaggagcttctacgtttgaaagatttctctctatgtctctctcatactcctgaagcagcgtatcggtatcatattccggatgacccgttaagaaaatctgtttttcgtcttttgaaacgattaaacagacccccgcttcctctgaaacgctgagcacattcagatccgaagccgattgcagctgctccgtattaatatctgtatgccgtgagtgtggcacatagtatagctcgtcaaatcctcttaccaatctctcatgttttttaagaacggtatgctcaaacacaccgaagatttttttcggcagctccactttctcaatgccgtaatgatagtataaaccggcttgagcgccccagcagatatggagtgttgaagtgacgttcgttttgctccattccatgatttccttcaattcttcccagtaagaaacatcctcaaacggcaggtgctcaatcggagccccggtaataatcattccgtcaaaccgtttgtggcggatgctggaaaaatccgtataaaattcatccagatgctgccttgccgtattttttggagtatgtgtgctcggaattaaaaacgtaaagtgaacttgtaaaggtgaattcccaagcatcctgaggagctgggtttccgtttggatttttttcggcatcagatttaaaatcacgatcttctgcggccggatatcctgatgaaaagcccggctttcatccattacaaagatgtgttcactttcaagcacctgcttagcgggcaggtgatttggtatattaataggcaacatgccacctccgttattccccgttaattttcttcattatagaaatttttaagccatttttcaatccatcccggcgtaataaaccgtatttaacgcataatgacagggataaaagcggcaaatgggtataaattcggagcggctcttttattatgacgggtaaagagccgtttggttcctcgaaaaaaacgttttccgttaagtggaaggaaaaagcggttaccgtttgttttgcagtgtaaaacaggtaaaataaatgaagaatgtaaaaaggagggccgcagatgacaatttacgatataaacgtacggaccataacaggcgaagacatgacgctatcggcttacagaggcaaggtgatcatcattgtgaatacagcaagcaaatgcgggttcacatcccagctcaagcagcttcaggagctctatgatacatatcgggaggaaggtcttgaaatattgggatttccctgcaaccaattcatgaaccaagaacctggaaatgaagcggaaattcaagagttctgtgtgaaaaactacggagtcacattcccgatgtttgcgaaagttgatgtcaatggggcagacgctcatcctctcttcaaatatctgacggaacaggcgaaggggatgctcggcacaaaagcggtcaaatggaatttcactaagtttatcgtggaccgaaacggtgaagtcaacgggcgtttttcaccgaacgtcaacccaaaagagcttgaagatacggtgcagaggcttttggcccgataagaggtgatacggtgaacgaaaaagagcagctggaaagcgtcaggaattgggtcagagaaaagcttatcaatgaacgtacgggccatgactggcttcatatttcccgggtcgcaacactttctgtttatatggcaaaagaagaaggcgccgacttatttatcactgagacggccgcgctggttcatgatctgattgacgccaagctcgaaaaaagcgaaaggctgacggcaggcgaagtgacagaacggctggctgctttcaacattgcggctggctccattgaggagatcgcggatatcatcacgagaatgtcattcagacacagggaactgctgataaagcggccgctttccttggaggggaaagttgttcaggatgcagacatgcttgatgcgatcggcgcagcgggcatcggcagggcttttatgtttgccggcgcgaagggtcacccgatgtacggaactcaaacaagtgtgctggcccatatagaggataaattaatcaagcttaaaggcttaatgaatacaaaagcgggggcgggtttagcagaggagcggcatcaatttcttttgcagttcgccgcccgtatccaaaaagaggccggcatcggcaaaagctaagcggcgcaatagaacgcttgtgccgactatgttagaataagtgtcagattgcgcataggaggaccaatatgaagattaaatcaatagaaccgacgccgagtccgaacacgatgaaagtgattttgactgaagagcttccggcggggaaaagcaacaattacaagcctgatcaggcagatgatgctccggccgtcgtacgtgatattttaaacattgaaggagtaaagggtgtttatcacgttgccgatttcctggctgtggagagaaacgcccgttttgactggaaggacattctgcctcaggtccgttccgctttcggaatggaacatacggagcagtctgagagccgttctgaacaggaatcgttcggtgaagtgaaggttttcgtacaaatgttcagcggaatcccgatgcaggtcaaattgacggacggcgaacgtgaagagcgcttcggccttccggaacgtttccaagaagccatcttaaagctgcgttccgaagcttcaaatgttgtatttgagcgggcttggaaagaacaaggcgtgcgcttcggggattttaccgaaatcggacacgatgtcacagaagagcttcaggccgcctacagtgatgagcggctcaaacgcctgacagaagcagccgtacagcaaaagggtgaggccaaaccggcagtgcagcggaaagcttataaagtgactttggaaatgctcgatgatgaagactggaaacagcgctatgcccatcttgagcaaatggatccggatgaagacgatttaccagtattagaaaaggcgctgcatgatccgaagacttcgatcagaagacaagccgtcgtttatttgggaatgatcgaaaagccgtctgtgcttccgctgttatacaaagcgcttgaagacaaaacggtgacggtcagaaggacggcgggtgactgtctgtcggatctcggcgatgcgagcgccatcccggctatgacgaaatcgctcagtgactcaagcaagctcgtgcgctggcgcgcggccatgtttttatatgaagtcggcgatgaaagcgcactggaagcattaaaagcggcggaagacgatccggaattcgaagtcagcctgcaagtcaaaatggcgattgaacggattgagcacggagaagaggcgaaaggttcagtctggaaacagatgactgaaagcagaaaaaaagaacagttataacaaaaaggtgcgccatgcaccttttttatttgaattcactttttataaaaattatttagaatattgttgaaaaatgattcaaaactctatatagtaagtacaatattaattgttggagggtttttatcgaaatacagaaagaatagaaaagcgagacagggcaaagacgctgtaaacaggtaatttgcagaacgcgccctagaataaactgaaaattttaaaaatagtgcacagtctaaaaacagtagggggatcaccatggcagaattacgcagcaacatgatcacacagggaattgacagagcgccgcaccgcagccttcttcgcgctgccggcgtaaaagaagaagacttcggcaagccgtttatcgcggtctgtaattcatacatcgatatcgttcccgggcatgttcacctgcaggaatttggaaaaatcgtaaaagaagcaatcagggaagcgggcggtgtgccttttgaatttaacacgatcggagtagatgacggaatcgcgatggggcatatcggcatgagatattcactgccgagccgtgaaatcattgccgattcagttgaaacggtcgtctcggcgcactggtttgacggaatggtctgcattccgaactgcgacaaaattacgccgggaatgctgatggcggctatgcggattaatattccgaccatttttgtcagcgggggccgatggcagccggccgcacaagcgacggccgcaaaatttcgctttcttcagtatttgaaggcgtcggcgcatatcaagccgggaaaatcggtgaaagcgacctgcaggagctggaacagttcggctgcccgacgtgcggatcttgttcaggcatgtttacggcaaactccatgaactgtctgtctgaagcgctcggtctggcgcttccgggaaacggaacaattctggcaacttcaccggagagaagagagtttgtgagaaaatcagcggcccaattgatggagaccatcaaaaaagacattaagccgcgcgatattgtcaccgaaaaagcgattgacaacgcctttgcgttagacatggctctcggcggctcaaccaacacagtgctacatacgcttgcgcttgccaatgaagctggggttgagtactctttagaacgcattaacgaagtggctgaacgggtgcctcacttatcgaaattggcgccggcctcggacgtcttcattgaagatctgcacgaagcgggaggagtctcggcggcccttaatgaattggcgaaaaaagaaggggcgcttcatcttgacgcgctgactgtaacaggccgcacactcggagaaacaattgcgggtcatgaagtaaaggattatgacgtgattcatccgcttgacaatccgtttaccgaaaaaggcggtttggccgtcctgtttgggaatctggctccggacggcgccattatcaaaacaggcggcgtacaggacgggattacaagacatgaaggccccgctgtcgtctttgattcccaggatgccgcgcttgaaggcattataaaccgcaaagtaaaagaaggagatgttgtcattatccgttatgaagggccaaagggcggaccgggcatgccggagatgcttgctccgacgtctcagattgtcggaatggggcttggcccgaaagtggcgcttattacagacggccgtttttcaggagcgtcccggggtctttcaatcgggcacgtatcacctgaagcggctgaaggcggcccgctcgcattcgtagaaaacggcgaccatgtcatcgttgacatagaaaaacggattttggacgtacaagtgcctgaagaagaatgggaaaaacgcaaggccgaatggaaaggcttcgagccgaaagtaaaaacaggatatctggcccggtattccaaactcgtaacaagcgccaatacaggcggaatcatgaaaatataaaacagaggcctgaacaattgaattccggccccctctatagtatccttgacttcatataaggatttttagagggggcttttttatgtcaatggcttatgaagaatatatgcgccagctggtcgtgccgatgcgccgtgagctgacgggtgcgggttttcaggaattaacgactgctgaagaagtagaaagctttatggaacaggcagagggcacgacattggtcgttgtcaactccgtgtgcggctgtgcagccggtctcgcccgtccggctgcgactcaggctgttttacagcatgaaaaagcgcctgatcatacggttaccgtatttgccggtcaagataaagacgcaactgcaaaaatgcgtgaatattttacggggcaggaaccttcctcgccatcaatggcgctgttaaaagggaaagaggtcgttcattttattccccgccacgaaatcgaagggcatgacatggaggaaattatgaaaaatctgacggatgccttcgatgcgcactgctgaaatgcccgaattccgggcattttctttttggagaaaaagatgatcacaacgagttacagaccaagcgaatacacgatacacacagcgcagtcactcagtgtcaggctgggtgacacttactgcagccgcaataaacagcccattgaaaaaatgctggaacgagccgctagcgatcttttagtcatcggaaaggaacggttcgaactttacacgaagcaaggggagaagttcttttttcacccgaatacagcgatgttccgcgcaaagcggtttttgagaggggaagccgagccgttgttaaaagcagccggattacgcgagggggattcctttttagattgtacgctcggcctggcatccgatgcgattttggcaagcctggcagtcggaaaaagcggacaagtcatcggcctggagaaaaacaagcttgtctcattgcttgtagaaacaggacttcaaacgtgggaaaccggaatggagcagctccaaaccgccatgaaacgcattcaggttaaacatgccgactgcgccgattatttgcgggagcttcctgattcatcggtagatgtcatttattttgacccgatgtttcacgaacctgttgaaacgtcagacggcattgcaccgctccgcgcgctggcagaagagggttttaacgaagagtgcatcacgcaagccgtccgggcggcgaaaaaatgcgtagtgcttaaagaccattggaaaagcccgcggtttgaacgatacggcttcaaggtgctgaaaagaaagacggcgcttttccacttcggtgtcatccatgtaagctcatgatatcatgggcttctttttcgttaatcagtgatttccataacgacaaaataaagcagcgtgagaagtgatacagtcgcaaataaagcgttaatcatctcatcccctcctttttctccttcttattgtaagcggtttatccactcggtcacagttaccaatttcccatattgcatgataatacggtgccggacatgacgccgcgctttaatctatgctaaaataaaggaaaagaggacaataaaacagaggggaacaatctatcatgaaattgtggatgaaaaagacccttgtggttctgtttaccattgtaacgttcggactcgtgtctcctccggctgctttgatgacagacaagccttcaggacagtcgagcagtcttgagcagaatgattacaccgctttttatgatgaacacgccctgacgggagaagcgaaggcagggcgggagcctgaattactgtttcaatcgtatcagcagcagcttctcggtgatgctgaaaatcaatcatttttaaaattcggcagcaaaatctctccggtcattgaagatgattacagaagtgaaattctgccgaaaatcgaagatgtcatcacaggacatttagccaagtttcaagatgatgaagcgtatcaggatgtggttatttccagtaaaccgtcggccggaaaaactgaaaaaatttttcatgtgtataacaggctgacaggtgaagatcttttaaggttccacgtccgccgggatcatcctccgcaagacggctactggtttaattttcattaccataccgctgaagacggatttcaatcacatcatgagctcggcagcatttactgggaccgcaatacgccgcctgactggatgagcgtgtaatagcgagaagaaataaaaaaatcatttctgagaaattttgcagaaatgattttttattgtgttacactactaaaagactactttaaaaggatgaaaaaaatgaaacaatataaagatttgtgccgtcatgtgttagaaaacggagaaaaaaaaggagaccgtacgggaacgggtacgatcagcacgttcggctaccaaatgcggtttaaccttcaggaaggtttcccgatgcttacgacgaaaaagctccattttaagtccatcgcgcatgagctgctttggtttttaaaaggagatacgaacgtccgctaccttcaggaaaacggagtccgcatctggaacgaatgggcggatgaaaacggagaactcggaccggtttacggctctcaatggcgttcgtggcgcggagcggacggcgagaccattgatcaaatctcccggctgattcatgacatcaagacaaacccgaattccagacgtttaatcgtcagcgcctggaatgtcggcgaaattgatcatatggcgcttccgccctgccactgcctgtttcagttttatgtcgcggacggaaaactgtcgtgtcagctttatcagcgctcagcggatgtctttctcggcgtgccgtttaatattgcgtcttatgcgcttttaacaatgatgatcgcgcatgtgacgggacttgaaccgggtgagtttgttcatacattcggagacgtccacatttaccaaaaccatgtggagcaggtgaatttgcagctgacaagggatgtccgtccgctgccgaaactgcggtttgcgcgaaatgttgattctatttttgattttacgtttgaagactttatcattgaggattatgacccgcatccgcacataaaaggagctgtcagcgtatgatttcgtttatttttgcgatggatgagaaccggctgatcggaaaagataacgatctgccttggcaccttcccgatgatctcgcatatttcaaaaaagtgacgacgggtcacaccattgtaatggggcgcaaaacgtttgaatcaatcggacgcccgcttccgaaccggcggaacatcgttgtaacctcacgggacgaatcttcattcccgggctgtattaccgccgactcggctgaggaagtgctcaagctgatcccggcggatgaagaatgctttgtaatcggcggtgcccagctgtacagtgcgctctttccctatgcggacagactttacatgacaaaaattcaccatgtctttgaaggagaccgtttttttccggaatttaatgaagctgaatgggaattgacctcccgcaaacagggagtaaaagatgaaaaaaacccttacgattatgagtaccttgtatacgagaaaaagaattaagcagggggacaagaattgattcgttacggctgccttgtgatgtacgttgtatttatgttcatgaaaaatattcaggaatatatcaatcaaaaagagcttgacccgcggctctcttttcaaaaacagatgaggctggtgtatgagcggccgaaagcctttatgagaggctgcattgacgtgtcgggatcggcaatcggcattcatcatgatcagccgataccggacggccccgtattgtatgtgcatcccagattgcgcccggctgatcttctgctgcttgcgggacatcttgaagagccggctggttttatcgctggcgagaaagctttccggatgccgtttctcggaaattggctgcgtctgatgggtgtcatttgtggcggagacagccgggatgcagtgcttcaggaggcggaagtccggctgcaaaaagggcaaagtctgattctgtccgaagacggcaaaatcaatccggaggaactggcccttcgtttcgatctcccgattgtgcccgtcagcacttcgggaacagaccggctgctgcggggcaggttattgaaacggctgaaaccggctgatattgaattacatataaagcccgcttattatccggccggtcagaaacggctccgtgcataaaaaaagcacagtctctatacgagaggctgtgcttttttatttcagataaagggaactttgacgcaataaaacaaaatacagaaaaacatcgaggcgctgccgcctaaaacaaaactgtgccaaatggcgtgatgatacggaacttttctccaaatataaaatattgtgccggcggaatacaataagccgccgaaaagaagaaggccgaaaccgggacctgacagcgaagcgtacagcggtttaatggcgatgatgatcagccagcccatcattaaatagacaagcgttgaaaaaatgataaaccgcttcacaaaaaagattttaaacacgatgcctccgatggcaagcgaccaaacaataattaaaagggtcagaccgagcgtccctttaaggggtcctaataaaaatggcgtatatgttccggctattaatacgtatatcgcggaatgatccacaatttcaagaatgtctttcgtttttttatgctggatgctgtgcaaaagagtcgagctgagatacagcaggagcattgaagcgccgaatatggaaaagctgacgatgtctgtcggcgagccgtatttcaccgcaaagataatgagaaaaataagcgccggaatcgacagcaatacaccgattccgtgtgtgacggcatttgcgatttcttcttttattgtgaacaatcaaatgtcctcctttttaaaggatttgtttttgcagtgactgcaaaaaggtcaacccttctaatgtgatttttgttcctgcgcgtcctcggccttttgtcacatagttcatcttttctaagtaatcaagcctgtttctgacttgctggggcgttaatgtcattgtgctgttttcgcttaattcggatatgctccgtctgctggcgggttcgccttttgtatttaagtctttaattgcttccaaaataaacaaaaactcttctttctccatcaatgtcagccgtttttcttttttcttagcggttttcgctttctggctgtttttgatatacggcgggacatgctcgggataaatcgtgctgccggatgctgccgcggccatatagtgcgccgcattttcaagttctctgatgttgccgttaaaggtgtgccgctcaaacagcggataaacggacggatcgatatgaacatgctgccccgaggctgtcagcatatgctgcagaagaagcggtatatcgctttttcgttcagataaagcagggagcggaaggcctaacacgtgaagcctgtaaaataaatctatgctgaacgtgttttccgcgccggtatcgccaagattcgccgtgctgcttgcaatgatgcgggcggaaagcccggcgtccagctcggaaagaaggcgggcctgtaccgagagcggcatgtctccgatttcatataagaataatgttccgcggcgggccctgtttaatgcgccttcagccccgaacagttcatattcgagccgctcttcgctttgactgcagtgaacggtaataaatagttcgctgtttctgcgggatttatgatggatcgctctggccatttgtttttttccggttccgacttcacccgttatgaagaccggcaaatcagataaggcaaattgcgaggccaatcgtttcgcttctgaaaaggtgtgatgttcgccggctagctgataaaaaggatcagtttgttcaattacactcataaattggctccttttggttctaattggtttaagtataacacgtttatgcgatcgaaaatatctttttctcttgtatcggttcatttatttttatttacaaaattaaaataattatcttattgtttgaatattcatgttataatggcatattaaatagggatttaaataagaaaggactctgtaaatgaaaccgttgcttaaagaagactctctcatccaggtaaaagacattttaaaagcgcaccaaaacgtaaaggacgttgtgatacatacgcctttgcagaggaatgacagactttctgagaggtatggctgcaatatctatttgaaaagagaagacctgcaggtagtcagatcatttaagctcagaggggcttataataaaatgaggcagctctcaaaagagcagactgaaaacggaattgtatgcgcaagtgcgggaaaccatgcgcagggggttgcgttttcatgcaaacacctcggcattcacggcaagatttttatgccgtcaaccacaccgagacaaaaagtatcccaagtggaactgttcggaaaagaatttgttgaaatcatattgacgggtgacactttcgatgatgcgtataagagttctgcggaatgctgtgaaaaagaaaaccgcacgtttattcatccgtttgacgatcccgatgtcatggccggacagggaacggctgccatcgaaattttaaatgacattgacgtcgaaccgcattttctttttgcaagcgtagggggaggaggactcctgtccgggatcggcacgtacatgaaaaacatctcgccggatacaaaaatcatagcggtagagccgaagggcgcagcctcctattttgaatcgaaaaaagccggacaagtggttgaacttgagaaaattgataaatttgtcgatggggcggccgtaaaaaaaatcggcgctgaaacctttcaaacgctcgaaaccgtcgtcgatgacgttttgcttgtcccggaaggaaaagtgtgcagcacgattcttgaattatataatcaatgcgccatcgtggctgaaccggcgggtgcattgtccgtgtcagcacttgatctgtacaaagaagagattaaagggaaaaacgtcatctgcatggtcagcggagggaataatgacatcggcagaatgcaggagatgaaggagcgctccatgatttacgaggggctgcagcattattttatcgttaatttcccgcaaagggcgggagcgcttcgcgaataccttgatgaggtgctcggtcctgatgatgacatcacccggtttgaatacacgaaaaaaaataacaaaagcagcggccccgcattggtcggcattgagcttaagcatcgggaagattacggcgcgctcattgcccggatgaatcaaaaaggatttcattacgtagaggtgaataaagatcaggatctgttccacctgttaatctgactttttttagaacggccgcgcaaaatgacagacacgctttctcagattgtatataataaaaagaaaacaatcgaaaaagaaggattgatatcttgttactcaaaagcctagagttcaaacgacaggacgggattcaggtaaaagtgacagaaataccggttatcacggaaggtgaacaatatttttttcaaattcatcagcaccttgagctttatttgagagaagtttttgcttcacaaagtgtgagaacagtgtattcattccgacaatatgtcaagcgccgtatgaagtggaaagattatgaggccgttttcagccaagagattttaaaacataacgcataacggtgcacattccttagcgccttccttttgataagggagggtgcgggaatttttttatgatgaacgctgtaagcgttttatctatgggggaatggaaatgaaaaaaatgaaaagcttcgctgccgtcttttgtttgctgctcttgtgcgcctgcggggggaaaacgataaaagacccgctgaactatcagattgagccgttttcatatcagaaccaagacgggaaaacagtgtcactgaaaagcctgaaggggcatgtctggattgccgattttatgtttacaaactgtaatacagtctgtccgccgatgacggcccacatgaccgaactgcaaaaaaaactgaaggctgagaacctggacgtgcggattgtgtcattcagtgtagatcctgaaaatgatacgccgaaacagctgaaagcctttgcttccaaatatccgctttcgcttcgcaactgggattttctgaccggttacagccaaaaggacattgaagattttgcgctgaacagctttaaagcaatcgtcaaaaagccggagggagaggatcaggtcatacatcaaacttctttttatttagtcggacctgacggcaaggtgcttaaagattatgacggcgtgcagaaggttccgtatgatgatatcctctcagatgtcaaagcggctgaggagctcaagtaaactggcagattagacattttcaaaactgaaaaaacatgttacactttccactagtagacggggaaggagcaaccagattgaagctgcgaatgttctcattgatcgccggactggctttgcttttatcagcttgttctgtccagcgcaccggttctgacgctgaagaaccgaaaacgaaagatcatattgtcatagctgcggtcggtgattcattgactgaaggagtaggagatcctgacggttcaggatacgtcggcaagacagcggagtctcttaagaaaaagggacatgtgaaaacggtagatattaaaaattatgcggtgcagggcgacaaaacgtcagacctgctgaaaaagcttgataataaaaaagtgcagaaatcattaaggagcgccgactatatcttttttaccatcggcggcaatgacttaatgaaggtgctccgccagaatatgatgcagctgacggttcagccgttccaaaaggaagagaaaccttttgaaaaacggttcaagacgatcatttcaaaaatccgcaaatataatgaaaacgcagagctggtgtatgtcagcatgtataatccattcacgtttacgctgcctgaattaaaagaaattaatggggttgtgacggattggaacaagatcgccgcaaaagagctggaaaaagatcctcacgccgctgcggtgaatgttgaagacttgttcagtcaaaaaagcggcagcagacggatttcaaaggatgatgattttcatccgaacgcaaaagggtatgcactcatcgccgaccgattatacggcatcatagaaaaacaagggttaccagcagaatagggtgaaatgatgaaaaaatggaaatcgctgttttttgttcttctcgcactcaatgtgattgccgccgcggtaattgtgacattattggttatgccgggagaacaggcgaaaatacaagatcagacaaaaagtgagtacggctttcatatcacaagctccaaagaatcacttgccaggtttgtgaattcgtacttaaaagagaaggcatcgaatcagcttgactacaaagtggacatcaataacgatgtgcacgtggcaggtaaaatcaaagcattctcaacctccattaacgcggtcgtcacatttgaaccgtccgtacaggagaacggagatgtggttttgaaagtgacgaagttttcattaggtgaattaagcctgccaatcagctttgtgctgaattatatggacagcttttatgaactcccgtcatttgtgcacgttcattccggggataaaagcatcgagatccgtctgtcagaaatgcctttagacaacggcatgtatgtaaaagcggataaaatcaatctcgacacggatgaaattgaattttcctattatcatccgaaacaataagttttcataaaaaaaacacagatcctttcagggatttgtgtttttttgtgtcagcgttttttgtctagcttgctgaacagtttgattaacgttgcaagctcttcatcagagtagcagtcaaaccgtttaaaaaagtattctgtttttttctggttgaaatgatcgacaattttctccccggcttccgtaatatggattctgataattcgcctgtcctctttagaacggatgcgggtgatccattccttttctactaaagcatcggtcactgcggtaatgtggcttgcggagacctcaagaatgggggcaaattccgttacttttttaggcccttgttcactgagaatccgcaaaatggtgaattcgttcctggacagctctttatctagaatttcattaacttcatttctgatttgtttaaacacttttcgaagcaaagcttccatatcatacatcatttgtgtccttactttcaaatcatgaacctccaatatgtagtcagcgtggcattcgttcagcttctcctgagagcagaattatttttattctgtttatacatgctataatataataataccacgtatgaacaaaggagggcacccgtatgtcagaaaaaaaagaaatcgccacatttgcaggcggctgtttttggtgcatggtgaagccgtttgacgaacagcccgggattgaaaaggtggtgtccggctatacaggaggtcatactgagaatccgacttacgaagaagtgtgcagtgaaacgaccggacacagagaagccgttcaaatcacatttcaacctgacatttatccgtatgaaaagcttgtcgagctgttttggcagcagatcgacccgactgatgcaggcggccagtttgcagaccgcggaagttcatatcgggcggcgatatattaccataatgatgaacaaaaacaaatcgctgaagcctcaaaaaaacagcttgcagaaagcggcatatttaaaaagccgatcgtcacagacattttaaaggctgagcctttttatgaagcggaaggctatcatcagcacttttataagaaaaatcctgatcactacgggcgctaccgtgtaggttccggacgtcaaggctttctggatgagcattggagggacagataagatggcttttaataaagaagaaaaaatcaaatcattaaaccgcatgcaatatgaagtcacgcaaaacaacggaacggagccgccgtttcaaaatgaattctgggatcacaaagaagaggggctgtatgttgatatcgtatcaggaaagcccttgtttacatctctggataaattcgattctcattgcggctggcccagttttacaaaaccgattgaggaagaagaggttgacgaaaaactggacacaagccacgggatgatccggacggaagtgagaagcaaaacagcggactcccacttaggccacgtatttaatgacggcccggggccaagcggtctccgttattgcattaactctgcggcactccggtttattccgaaagacaagctgaaggaagagggctatgaagcctgcctgcatttatttgaaaaatagagctcagcaatgaggcctgcctatcagacaggccttttttctatgtttttttttcttcatgtaatcgttcaataatctttacgattgtttcttttgtgatgagcggcgcctgatccgattgatatctggggagattgaccttccgaaattccggatgtttggcgggatccggcaatatcgcgtaaagattgccccattcatataaagattccgtctcatgaggagaggtcagttcttcatgaagcttctcaccggggcgttttcccacttcaacagcggctggctgcggcagtccgtgccggaacgcatattcttcaaacccgtgaagcagttcttcaagcctcagggactccattttaaaaataaacgtttctccgccctttgtaatcgccgcagattgcagggtgagcgttgcggcgtcatcgatcgacataaaaaacctcgtcatgtttttatccgtaatggtgagcggaccgcctgccatcaactgctcaaataaaataggaataacggaaccgcgtgaaccgagcacattgccgaagcggaccgaacaaaacaccgtaccgcggttttgaacatgatgattcgcctgatgaaacagcttctcggacaacagcttcgtagctcccattgtgtttaccggggaaacggctttatcggttttttaagacatttactgcattttgaggaactatcagtggcggtgagatcgaaagcgtaaaattaaacttcaggataggggtgatttcaaactgagccggaattggcccttttctttttgtgtcatcgtaacgataacttctttgaagaccattcttaatagcgagttctttttttctgtgcttgtttcaatgtgatattgatcaattatcttatttatgttgtttctgactgtattactgtctatttctgattgcgcttcttgagttccattgagttcatgcttggcaatctggagttctttaaattcttcatctaaaacagcttttcttttcaaaaaaagttcatcagtgtaaatgccgctttcatatttctcgaagataaaattctctttgttttttaactcttgttctttttgtgaaagatgttcagacatttgcttctttgttttcacattactatttacgtcttcgtatttagaaatcatataaatgatatgttttgttaaagtcttattatctaagttgcttaaagaagagaggtaatccagaatggcattttcaacatcgttatatctcacataagtgcatttattctttttgcaagtgagtgatttaacgtgatacacactttccgtgccgtttttgttttctcgcgttcgcctagtttcgtatttagataatggttcaccgcacttagaacaagtgcatacgcctgccaattcacttaattccaatgcgtttttattaggcagcaggggaactttgtttgcaattttctcttgtgattgttgaaattgttcttgatctattatagggacgtgtgcatccgatactataatttgttccttttcaggtctaattgttcgtttaccgtcttttgttttttccctaaccttatatttaacagttccgatatacgcttcgttttgcagaattgctttaattgtgtattgattccagcgcttttttcctgatggagtcggtatttgtaattttgttaagtgagaagcaatcgctgtataactaacttcttttccattcaacccatttaaaaagatgttaaagatgaattgaacgacttttgctttttcttcgactgggactagtttggatgtttttttgtttaaccggtatccataaggcgctagtcctgaaatccatttcccttgtgccgcatatgtgtatttagcgcctgtcatacgctctctggtcatttcaaattcttctctggccataaacaattcaaaacgaatctgacgcatgtctgcaggatttcgagggtcataaactttatatggtgtaatgataatcaatcgcttactttgaagaaggttaacaatttgtcccgcatcactgtagctcccgcggctgagtcttgttatttctttaacagcaattgcctggtacttgccttcctcgaggtctttaagacattctttaaaaacagggcgaccctcaatgctttctccagatccgatttccatttttaattcataggggatttcaatcgacttcagtattttattcatgagttcattttgttctgttagcgtatcttcgcctgttcttttttcccgctccatatcctgacgagagcgtctgagataacccaaaatatttgtaatgttgtaagaatgaacgatgttttttaactccaaaaaaacagcacctcctctttattgtatttactgtaaaaacagaagtattcgtacaatattctgtctgacattgaatacgagaataacctaaattctgaagatgaaacttttctcgtccagttgtcaggtgcattttgtaattatgaaaatgataaagcgaaagaaatgaataaacaactattcattaaccgatacggtgaagagcttggaattagctccattaaaggagataatcgatcagaatatgaagaaattattcgtacttatgaaaagaataattacaagcagaaagaaattaatatagatgagctgctgcaggcattatttgagacagagatgatgttatctttaaaagaaaagttttgataaaatcctaattgatgtatcataggggtttaatcagccactataggccacagagtccctcacacgctctgtggttttttgtttagattgaatgtaccaaataaaaaagaagcctcagaggacttcaaactggctctacggataggatagtaattaaaacagcaaataacacttacattttgttcaccacaagtgctgcttcaattatgaataaaattgttactgattaacaaattcgtatcctcagtaattattctgaggagtatgggggtgtttttattgactaactttgtccataagactatcaatggtttgaaaagtcttttagatgaaaaaggggctattaaattgttttgttctgagggatatattgtagagagccttgtgactttttctccaaacaaagcgtctcttagtgaaatccaaaactttcagtcgaatcataaattcactcttcctgatgattacctgaagtttatttctcagcataatggtgcgaaaattttcgaaattctttcagagggcgagaatattggaggaggtcttcatctatttagccttgaagaaatagaagaagaactaaaatacgagcttttgtttgaaggtatcaatggaatacctgtggctacctgttggaagaatgtcatttaatgatcgacaaggatagagtgaatcaaggtgatcctaattatctatttatatttgaaagtggttcagaatataatccattaaatttaaactttgaaatatttttagaccgatatattatgtcgaacggggatgctttttgggactggaaatactatacagctgaaaattattacaggacgagataaaactgtgtatgacagtcggaacggactgtctttttctgttaatcaaataataaagctatggtaaaatttagacagaaagaagcagaaaggagacgtaaatgaaagtatttgaagcatcctcgttaatttcagtagcggagaaacgggcaaaagaatacgatcagattagagaacaatttatcaatctcagaaaagcgtttcagggaatggctgatttagatgacaatgagttttcgggcaaaggtgctgataacatcaaggcattctttcaagatcacgcaggtgttacagacagctggcttgatctgatcgatatgaagattgcttttcttaacagtatttctggaaaagtatctgatgccggattgaccgattcgtttgtggaagagtcatttttagaacatgaactgattaatgcgaagaataaatcaaaagctatcatgcaggagcagcggaatgaaatgagggatattcttaatgagataagcgatattgttcatcttgatgttttctcgacagaggatgtcgatcaaaagctggattcagcagataagaaacgggacaataccgtacacaagctcggaaagctcgatcatgatctaacgaaggaatacgcagaaaccgaagcgaacgagaatttcatccaagcagactttcaacagctccaaaatgccacgggtaaagggaaaaacgcaacaccacttcactataacgtcaaggcgtacagagaaagtgtcatacataagaaaaaaggcgagattgcaagacattcagatgcttatttgacgattaaaaaagaagaagcgaaagagcgagaaatcaaggatctgaagaaaaagctctctgatggagtaactgatcctgatgaatacttggagattgccaagaagatcggttacgagaaccttgaaccttcccaacaacaatatgtgatgcagcttgaacaagcaaaacagatggaagaagccggagaagtgacctgggatattttaaaaggagccggcgtcggcctttatgatgtcgggaaagacacggtaaccggtttgtggcagctgatcagcaagcctgatgaagttgttgaaggtatcataggggcagttgcccatccaattaacacgtataatgccatttcaacagctattgaggaatcgtatcaaaaagatatggtgaacggggatgcttactccagatcaagatgggtgacatatgcggtcggttcagtggctgtggctgtcgtcggaacaaaaggcgcaggagccgttaacaaagctgatgcggcggggaaggtcataaacaaggcaggacaggcaggtcagaaaattaaggacattaagatttcagatttgcttccttataacactaagtatgatcttgctctggctgataacgtaccatacaatgtggttaacagccaaaaccttaaaaatggacttttgtccagtgcaaagaaattggatgaaagcagaaagccatttactggtcagaaagtaaatgtcccttggttaaataaagagaagtatgaggcctatgaaatagacggcaaggtaaaagttaaaggagagcctagagatgtaagccgtagagtatacacaatgaaagatattgaccttaatcaaaaaaatcgtaaaggctttacgaatcttcaactgatgaaaaatggtaatgctccgtttgctaaagatggcacgcaaataaatttacatcacttaattcaagaagagcctggtactatgctggagatacctgaaagctggcataataagtacagtgatgttttgcatggattaaaagggaatggacagagttttagaaatgatcctgtgcttgataaacaatataaaagtttcagaagaaggtattggagatggagagctcagcaatttgagaatcaagaataagaggtgaaagtttaatggattattcgaaaataaaaactttctttgatgaaaataaagaaaattcaattctcacggggggagtcactgaagatcagattagagaaatagaagaggagctcaatgtaactcttccagacagctataaatggtttttaactgagtatggttcagggggagcatacggaacaatgattctcggatatgactctcacggcgctgaagttgtcgagcagaccaatgaatataaaaaatattataacctttccgatggtcttgtagtgatcgaatatgtagatgaattttcttattgtcttgacactaacaagatgatagatggagaatgcccagtcattctttgggataaccaagagggatatggtaaacaagttgctaggacattccaagagtttttaatagaagagcttgaagaatcgaaagacgactggatcgatgatgaggactgggacgattaaaactaaaaagaaggtctatatctgtttttccatagcatatgaaggagtattaaaatgagcttcactaagatcaaacaaaagttgaaagagtttacgattaatgctggcacagatcctagcattaatacaaacgagcagctcaaagaaattgaaagaaatataggtaatcaattgccttccgactataaggattttttgaagggatatggaggctgttatttagaaagtaaaaaaacaacagatgaggttgagtatgacgtttgctacaaacctatagagaaagatccttggatgggtcaggaagatgatacacaattaatagagagcttctatggtttagctaacgatcataacagtctccaagaagcaatcaatacttattctgatcgctttcccaggaacattattcctatagcaagctcggcaggtgggaatgaaatatgcatggatatcgataatgaaaagatattgttttgggatcatgaattaagtcaccccgataaagactttttccttattgccaactcttttgaagagtttattctaagtttagtagatgaaccaattgaaactgataataatgacagtgatgtggaaattgaggttttagacaatgactttgcaaaattgctctttggtaaggacaattagcttttattgttaggaaaagtattgcaaagttaagctctcagaaagagagcttttttattttcgatagaaactaattataaaaagggagagaggttatggattcgtaccaagtaaagaaattaaaacccgaagaataccataagtgtaataatatttgggacatggaaaagaaaaagaaaatggctaaggtgttttatgacgaattagtaagcggaaacagaattacttttatttactcagtgaatgacgagtttataggagaaggatcgttagtttttcaaaacaatgacccagattataccattccggataaacgcatttatctgtctcgtatgattgttaaagaaggatattgaaattgcgggataggcggtattattgttgattatttgattgattatgctaaacaacttggatttgaggaaataacattcggtgtagatacagataacttaaacgcaagacatctatatgaaaagaagggctttacaaccgtattatttcttggtgaagatgaatatgtaaaactccttaaagtattaaaataaaattcccgagaattatggtgaatgtgtgggaggttactttcacaaacgatgatagacggtaacttaagctaatctaattcgttattaagatacggattagcatttatcctctcaaaaccaacccgtaatgaactaggatactgttggctgaggaattatttttccatgtattgtattttatggtattcttgaaatgaaaggaggagacaatgaaaaagaaattaattggggtcttgatcattgtttgtttttctgtgttcatgtatggcgcagttacacattcttttaaaaatcaaaaatccactgaggaagtattagaaagtgcatgggatgaatttggcttatttagccttggaattggagaaacagacccagtcatatcaattggtatggataaaacaaaaaatgaagaagaattacgacgctatctaaacgataacttatctaaggaagttaaagaagaatataaagttgagatcattaaaaaggatattaaggttttagaaagacaacatgagaagtatttggaaagtaataaagcgcattgatacattaaagatgcttatcggctccaaatacaataatgattttatccaataaacaaaagttttgcaaaccattccaatggtttcatttaatctgttataatcaatctgtaaaatacagactggttatagtgtatttctttaacaagaaatgcataaaataaaaagagcatggtgttggtcgcaacccatcaaagggcttgctcagatgttatgttattcatgatagacctaacccttcaggttatcaggctcaagggaggtctattttttatttatatacgtcaacagggcgattataaacgacccaaatgcaagcattcacattaatgcctgaaatgttgacataagcatcaccccctttctatagggggtgagcaagactccaagactccaagattcccttaagtgagcatacttaatgtacaggaatcatttatatgtcgttaaaaacccattcagttacctatgcgaaaagaaccatgttagaatcaggttcttttttgaatttgagttaaataatcggctggaattaccgataaataacatgtgaaataataccaaggaggttaagggattgaaaaaagtacttagtttagtaacaattacacttcttgctgttacaacgatgttttccattagcacatcgaaagcaaaagcaattgaagcaacaccgctttacagtcttcagattctttccgtcacatcggatggaaacgactttgtatgggagcctgttacaagcagcaagccaaatgcaacaaatgttttgaaaggtgacaagctgcatattaaagttcgctttatgggctatacaaattcgaccgtcattaaagcaaaggatgggagaaatttgttatacaaaggtgaagcgaacatatacaaatatgaccctatacttggacaaaacaaagttgtgataggatgggacaaatacattgaaattccaatgaacgaacttccttcaaatgagattcaagttgaaggtcttgggaaaaacatgaaaatcatttatagcaacgttgtaaaattcgagagaggatgaatgttatggaaggtctaaataactcttacaatatcacgaaagatccgaaatttttagcgttttgcagtttagcgacagaaggtgcaggaattagttcgaatacgcaatgttcaattggttttaatgaattcaaagaagcgctggagaatggcaaagtagttgataataaaaaccttaaaagcagttcagagttaaatcaccagtttgattactggaagtccagaataactgggggacgagctgtaactgaaactgataatcaagtgttagatatcatcaaacaagcatacaatcttggaatggttacgaaagataatatgcttttgagaaatcaagccattaacgcgtataaaacatctatttaatttaaaattaaagccccttattcaggaaggggcttttgctttgcaacttattctttatgtttaatctaaaaccataaagtcctgcacttttgtttcttcttcaggcaaatcaaattcattaagtttctttttagtacggatatcaaaaatccccatatagccaccaatcccttttttgttttcctcttgtgaaattacataaagtttttgatctttaaactttgcattcatatacggaaattttaaatcgaatttttcaaaagaaaaatctttatcgtactcaagtaagcaggcgtatacggatttattaatatatgtaacgtaaaatttaccgctttttttgtcgtaatacacagcgtccgcttgttcgagatcatcaggatattttatgaattttgatttccatgatcctttttcgattacagttagttcatgttctgagctagctacaacatatttttcagagtgatcaaatacatctccataggaagctaatccaatcgttttaataatcccttctgtgtttctatcaatgacgtacatagacattccttgaatgacgtaaatatacctattatcgcttcctcccatggttacgagggtaggcaaagtcaggctatattttttattgaactttttatcatttactttcagttcatttccattggtgtcgacattataggcttttacagaaatatcttctccttgataccaaaaagcaaatggattggataatttatgttctttaatagtgttgttttttaatgtgtaataatatggttcatgttcagctaacaagacgatatcgtctgaagagggggtttttttctggatatatggtatatccggtaccttaaagtatcgtttattgaatttttctccttgtgatgtggatatgagtacgcttttcttgatgagtggatttgaatagataaaaaagattttatcctcggttggatttattttagaagtacttacagagtgttcacctttatttataaagaatgcattgatcaacaatataactattgcaccaattagaactcctgaaatcccatataaaacataagactttttcatataacgctccatatcttttatataaaaaaacacacttgcagaataaatctgcaaagtaaatgattaggagcagacagtttttgatgagcggtcaatatccagatgtgacaagtgcttctccattactgtttaggtctgttccttttgtgtttttgtatgattgccacacaagtttagaggagcaatactatttatttgtgctttttttggttgcagctatgaataaggcttacctgttttactatgaaggacagcattgcatagagctttacaggtgaacacagatcataaaaaaacaccccctatgcgggagtgccaaaacatttatgcggtttgccctctacgttccactgagaagtcattatggtgatcaagcgcgatatggatactggctgtgtggcctcttcgggcttctttaaaaactttgtggccgtcaagaagataatgtccaacaagcccaagtaagataactaaaaagataaaagccgatgcaaatttaaatttcataaagacaatcccctctctgaatttgttttcgggcataaagcactttctcataaaaggctgtagctactttatggtcttcatttacattataatacattgctgcatcagtcgctaggtcttccacatccgaaagcatagcttttgattctaagtaatctaagattttaaaaagtcgttctttgtcattctcaacgaataaacccataagaaaatcaaacatttttcctaatacgtcatcgttcaactcctttgaaagcataagaccttgttcacaaacctgttttccatcgaccgtgttgaataatttaaagtgcgtttttgccaacattagaagtatgtcaagcagtcggctagaattgtgaagagaattactttgataaattgagacgccttctttaaaatactccaatgccttctccatatgtcctgttgtaaatgagcataaaccgagattgtacaaagaagaacctattaaccgcggcatatcaatttcttgtgcttgttttaatgcattcatgaaatgcggtattgctttttctggatactccatgtctaaataattcagaccgatgacgaatgaacattggattactcttattgagtatgtctcgtgtgctttgtaggtttctattgcttgaacaatatgatgcatagacatgtgggtttgcttcatgtgatagtacacttcagcaactttgtagtgaaattcagctcgctctatttcatcggggacaatagatatcttcttttcagctcggttgtaaaaacttattgctttaagatattcgtactgttcaaattcatacatcccatgaaaaaagttaaaataatattcaagaattccttttagatcgctttgtttactttcgatctcttctgataagtctgaaattttaggtcgttcttcattcatggtttttggttcaagataatcaagcattaattgatgtcgaaaacacatgagcgaatagtacaacaataaatcttgatcttcttccatatgctctatttcttgttcaacttcaccctttagaatttctgcatctgcaacactgaataatcttatgtatttgtaccatttattgatttttaagccaacctttgaagaagagatcaattgctccaaaaaaatcaccctcctagtatttcgactgattatgtaatattttatcataatgtaatatattaggaagagtgttttttcttaatttctcaatttggtgtggaatgcgatagaagccccctcgttcgagaaggggatatgatcaatttcctgttgctttcagtgaggcaagccactcatctaatgttccggagaagccttgttgaacggctaattcatatgctgattttccatctttaccggcagcgctagtagcttcagtactgcctttttcaccttttttttaatgaagctaaccattcaaaagtgatgaatattcaaggcgggagtaaggaaaattaacaaaaaatgtgagggaatttagatgaaacgatttattttggttatacctttattggctgctgttattgtctctccaactcaaatgaaagcaagtccaatgccttgtagtgcagtactcgaaccggtgaatcaaaaattgaaaaatgcgaagggtgcggcactaatctataaagtgcagttatacccgccaagtgctgcgagaacgaatatgagtattcttgctgtccaccttcctcagccatcttcttatggaagctacgacggttatgaaggatttgcctccaaaacaggggagatcagttggcgatttaaactatatccgactcccgagggagagagtcctaattgggctggaaggattgattccatatcagctgaagtgacaaatgttcaagtgcaagtacgcctttcaaattctaagacgcaaaagttggggccgagtgtattaacaaataatattcaatcttgctattagaaatgtagagctcttatcaaagaaagaaatgcgactggatcttttgaaaaaattctggtgaaaaatgaagaagagtccattaaggcggagtccaatgaatgatgaggaattaagaatcattctgaaatcaattcatcattgacagaacagagccggcaaaagtcgatattgcgtttgattttgtacaagaaagacggcataaaaagaaatggttagctaaaaaaaggcaaagagtcaacgctctttaccatcaggtgttttccttaagcggtctgcaatatgcttaattaaactcagcgcagcagtcactaatccaataactaaagcaatctcaagtaagaggataattccaaaatttaaaccgagactttcaaagtaatcaccagtaaaagagagcaattgataaatcccaagcatcagcacaataaaggaagcgcctataatcgccagagactttttagagaactccttagtatggttaaaattataaaccaataagaacaaaaatagacaagccatggcgatcttatgagtcaatgaatcacttgctgaaaacccttgcacaagtaaggagataattaatccggtcattccgattattttgttcaatatatcacctgctttgtataagtatgacttagatgtcagcttaccaattaaaggtgaaattctcaacataatgcagtttaaagttaacttaaaatgtgattattttaagaaagaggttgaaatatactcgattgtcaaaaaggggagcaagtaaggtctttgagaatggagaaatgggaattatattgtggacgacaaatcgaggttctgtaggtgttgaatgggactctggtgaatatggtgaatacaatgataaagtcgatgagctatttgttagcagattaatatgttttccgaaagttagacgaaagcagttcattaaaggaagggttagacaatgattaaaataacgctattccaagatgaatattgcaatggtgaatgggttgaaattgataggctattaaatatatttataagaacagagtcaattaatattgaagttattgatatcaaatacaattcactaaatactgtgcgaactcaaatacactctgcgtatatatagagaaaggacttaagatcactaggaccgaagatgaaatcgtgattttaaacgtagtaagaggaagaaatgaaaacctatgtagcaaccaaggaaactgagtactttaccaatgaatccattgaagaggtgctttatgctggtacaataaagaagctgcgtttagcaaaattgatggcacttcaggcaatagactaattttagatgtttgttttgatggcttgaggattaaatcttttatcaaaattcataatggtgttggcgagtagcttttgataaattggccagcgcaaagaaagaggttgaagactacaatgccaaactaattgaggcaggcacaatctctttgaaatgttggagagagctggacaagtctagataaaagatagtttttattcaaatactcaaggcagagcctatcgcacctacaatgccaacaaaatcaactagtgttgttacgttgctcataaagtcaaaagaattgtttattagaaacataaaatcagcccctgtgaaaaaatttaacactaagataaaaaataataagaagaaggattttatcactggcttgttttttgtgtaggagcagccttgaatattcgattgtattactaatatatcaaaatttctacaattaatccaattctctcttacgatagtttttaacgaatacaaaaaagccccacgaatggagctgctagattacgtattattgaacatagccagaaaagtcgctcggagcagagaaagatagatagtaaagcgcattggcatctagattttttattgttcctgtagctgtaccgttagcatttacagttagtgtttcagtagcaaaaatccagtcggaatcattccaaactttcacagttagtttagttccaatattatttgtaattgaatagcttatcgaagatttgccttgaaaataactgtttgaatataacgtattgccagttgcttgtccagcgaatgtcaatttgtttttcgtaagatttacaacgctatttgaattaggagggttaagaccaaaagctttaaattcactttcgacagagttagtaagcttagttgaaaacctagaattgtcggtctcagcagatgcggcagtggcaatgctcagagaaagaatggccaccatggtgcaaacaataaaactaaacaactttttcaaattaaacactcctttatttgtaagttaaagtaaataataacatttaatttcaggaggtcaatgggtttattcaaactggaatgaatctgtcacaaaatatgaagagcattttggtgaattacagctaaacgatttggataacttattgtattatgtactgaattttcagtctgttttgctaagcattaaggagttatgtaatagagagattatactctccaagattcaaaggaaggtatgcggagtttaccatgtagtcttaaatctataatcactttcagccagctataagaatgtttattaatcccatatggagagttagctttattaatacgacgattccttcaagatgcttttcattggcagattaaagtaagctaatccgtttccctgcagaccttcaataacaaatacattgttatggtcaaggttaatgtctaaaagcatgcttttccgttcagtgagcgggttattagcaattgaatgccaattaatataaattatatcgactacacagtaaacgatattataggcagattttttagacataaagcgtcccattacagtctcaaagtcaggaagcaaaaacaacagtaccattgagcatatcaagattcgagatttctcaacttgcttgttactttattgttgtaaacgagtataaagctggaaggttcagtgtagctttaggagccgaattgcttagagaaagcactgtatgaagagggattttaattaaataaagcagacattaagcctgctttatctttttgaacattattccttttttatatgaattaatgttctcaccaaatgcccgtccttaagattttaaattctgggcacggtcagactttttagggaaaatacattctaacaaaagaaaaaataaagttaatcctaatgataatttaaaattgtcgctgttcccaatggaacataagatacccactatataaataaataaaaacctaaacaacgaggcaaatataaacttgaagaagttatccccaatgagatgccttccaacagccacaaaaatattatcaaaagtaaaagaataaacaaccatacacacacttgttataacaatctgtttaaattctatttctaattcaaagaattttacaagcacatttgctgatcctgttgcaaataagattatcaccattatgattgcagtaggaatgagtgataaaaccaaagctcctattactgtagataataaaaatttttcatttgtgtttttttctgcagcttctttcttttctcctctgtacataaaaataaaaaagacgatgagagataaaagataaattgataacgtcataacaagcagattcatggtaatctctccttacctaattaaaacaaaagagtgaaggttgtaagcctcactctcttgtttttaatgtatagttataccaaaaagaacacaacaaccttcgcaattaactgtgcatcagctaatggaattccggctttcactaaggccacagtaacagctgtttctccgaaatttgtaagttcatctataacgtccgccgctttgtgtccccacttagaacaagcatcaccagctttttgtgcccatttatatgggatctttttaataaggtttcctaaagcggggccaccaaccctaagtgcttttactaatatttgtttagcgaaaggaatgccctgtgtatgtacttcaggatttgaagctaaaggagcctgtacgctattttgaactacaggtgcttttttactttctgctgcacttgcatagccaggagaaacaactgatatagccagcacagccaacgtgaacaccatgataaatgaaataagttttttcttcatttcttcaccatccttaaataaccattagtttaatatatttacaaatataatggatatttgtaatgaaatcaatatattacctaaaaaattttagttataaaagaaggaacaagaattttaaaaacatacttttgttattatacgagacacaattttcttaaaaaagaaccgaaagtctcattggggatgcccattttatgccgtggagaagattcaataaaactgtaggtttaacaaaaacaaatattttcaggagtgtaatatcataaaacactcagaggggaattaggtttaagaaacaccattggcaagattgaaattgttggaattttactggagtggtttgctttatgattttggggcaggagttaaggcgaaaagagataactcagacttggaatgatactgaaagcaacgtctacgatcaactttgacaaatactcaactgctgctgtcgttcaaacattaggatttgcttttaatttgcctacaggggctggtcatctgatttagctggattagctaataatgatcattctaggtgaatataaaattgtttacttttaggataagcaggaatgtaagatggcagggacggctcttatgacaaaacaccttgtaacgatttatgaagataaggatcaaaagaaaaaatcgggagtgacagctttatcatcacagacaaaggcggcccaaaagttgctgcaatgtgataaaaaataaccctgtcttaggcggggattattacatgctgtttattatgctgtaaacaaacgcaacaataaataatggataagagataatagcaattagttttgaagatttgctctttttttcaaatgtgtatattagtgcaaatcctaaaaagaatattgtgacaaaccaagaagaataggacgggtacaatgcaataagtaagacaataagagtggataacgcaaaagaagagtcaagtgttattttctgatcgtttttcaaataaaccgcctccttacacatattccacattagatcgcttaaagaaggtgttgtggttgatcagccaattaaatatttcatgatgcaattgtgcggttctatgatggtaaagacctcgccgtgttccataagactacggggaagttgttaaaatccttaaaaatgagtcgttttagtctgtcatttcctaaaacagtgttttactcttgttacaaatatgcaagaagggcggtttgaacttgtatagattatgtacaatgctgttaattttgttaagtataacattagggtgtcaaaacccaaagcaaacattttatggaggctgagcaaaccatggtcggctatgtcattttaaaaggagagaatcaagcaattttcatacataatgaaaaagctaatgttaaagactatgaaaatcttagtgaaaaagagattattaaaaagtatagatcggatatagttttactgggacttagtcaacttaacaataaagatgacttgagcaaaggacaaaaaattcgtatttggtataaaagattcaatgaatcttcaccgccaaaaacaaatatctcaaagtttgaaagtatttagtatttattctttgattcccagaaaaccgctgcaaaactgaagcggcatattgaaccgaaataatgtcttcaaacctcacgtcattcttcattcgcggtggcttattcctgccccaggatttatttgacaattgttgactcaggtgcagagaaggcatatgtcaagaacacattttgaattactgggcaccttgaataaagccagcattcccatattcatatgcgaagagatcggtactgaacgctggatcatacatttgaacaagcttgcgaggctttgataaagaaagaacagtcaagagacgaaccattacatacatataatactcctgtgaaagcgggggtgtagttttggaaccttaccaacgttatgaggaattaaagaaaaaaacaataaaggttgtccataaagataattacagtatccgctatatagatcaggatgaagcgagtaatgacttagatgaattttataaacaatttgctcagcatttattggaggctgctttggaaaggagtgcagagtaagcttctttttttgatttgtttgtggtaagtatcttaataaacggctttatcagtactgatattaatcacatgcgtcacttcttgcagcaaagccgcttctgcgacattttgtccgccgataaggttggtttgaatggcttcaaagggattatcctcacatgtcggaacctgcttcagcgcagctgtgtgaaagacaatatcaacacctttcatcacttggttgactcttctgtagtcacgaacatcgccgagcacaaacgacagtctttgttcatccgcgtatttttgcttcatcacatattgtttactgtcatctttgctgaacacaatgacttctttaggggttaagagcaaaaggcgttttactatttggcttccgattgatcctgttccgcctgtgacgagaacagttttatcgtgaaaaaacggttgtagctctactgcttgctgtttaggcatggcttatcctccaactctcgtttctctaccatgcatcatatgttgaacaatttcagcgagttaatgaaagaaaccaataaatcaaaaattagagaaaaacattaatctgatgcgctttcatatcgcgttacccgattaatagaatagaaattacaaataaaacattgtactaaatattcattttaaatatttgctcacgtcaattttttctcttcataaatcctcacattcggacaatcttcacaaaaacttaacactgaacttcctgtatgtattttacaattaaagtgcacgttcataaaaggaggatggaaaatgaatcattcaaaaacacttttgttaaccgcggcagccggattgatgctcacatgcggtgcggtttcttcccaggccaaacataagctgtctgatccttatcattttaccgtgaatgcggcggcggaaacggagccggttgatacagccggtgatgcagctgatgatcctgcgatttggctggaccccaagaatcctcagaacagcaaattgatcacaaccaataaaaaatcaggcttagtcgtgtacagcctagagggaaagatgcttcattcctatcataccgggaagctgaacaatgttgatatccgttatgattttccgttgaacggaaaaaaagtcgatattgcggcggcatccaatcggtctgaaggaaagaataccattgagatttacgccattgacgggaaaaacggcacattacaaagcattacggatccaaaccgcccgattgcatcagcaattgatgaagtatacggtttcagcttgtaccacagtcaaaaaacaggaaaatattacgcgatggtgacagggaaagaaggcgaatttgaacaatacgaattaaatgcggataaaaatggatacatatccggcaaaaaggtaagggcgtttaaaatgaattctcagacagaagggatggcagcagacgatgaatacggcagtctttatatcgcagaagaagatgaggccatctggaagttcagcgctgagccggacggcggcagtaacggaacggttatcgatcgtgccgatggcaggcatttaacccctgatattgaaggactgacgatttactacgctgctgacgggaaaggttatctgcttgcctcaagccagggtaacagcagctacgcgatttatgaaagacagggacagaacaaatatgttgcggactttcagataacagacgggcctgaaacagacggcacaagcgatacagacggaattgacgttctgggtttcgggctggggcctgagtatccgttcggcctttttgtcgcacaggacggagagaatatagatcacggccaaaaggccaatcaaaattttaaaatggtgccatgggaaagaatcgctgataaaatcggctttcatccgcaggtcaataaacaggttgacccgagaaaactgactgacagaagcggaaaataaacatgaaaaaagcagcttatccaagctgctttttgatgtgaagagcgtttcatgagaaagtcttggaacggatagccgtaagcacagccggcagccggtcatacgtgtacgccggtactgtctcttgataattaagcgccgcgatttgtttacgttcacccgggtttgtcatataaaaatggatcttatccgcaaaatccgcaaacccgctgtaagaaacaaatgttgaaaacgggggcgcgggagaaaggtctgtcagctgaaaggcctgacaagccgcaatgtctaagcttctcgtatttaaactggtattttcgatgccgcgtccgttctgattgagcgcaaaccgataagaacggtgagggtttaagaccacctctgcgctgttgtaatataatgcggcaagttcgggttcaatccattcatccattacgagcacattttgctgtctggcgatttttttaggcagatgtctgcgccatcccttcccgataatacgaagcgtatacggaagcttcgccgctgctttcaccagttcaacgcggttcggatacgggtatccgatcagaagcagatttgtgtgaagagaggcttcagcaggttgttttttaaaaagccgctgattaacggggatcgggacataatatacgtgctgtaagcccatttgccggtaagcatcaagcgcgttttgttctatcgttaaaacggcatccgcaagcggcgcgattgtcatactcacatcgaaataaaaaggatcctccgtcatccatagatatacgggaatctgttctgtcttcagccattgaagccattcagacggaatacggtctcccgtcatcatcagactgatgtctggtttgaatgcccgtatactgcggatggtatcttcctcaaactcagaaacagaaaaaaagcggacggaagactgtaaaaagccttcctcgatccagcggtcaaaatacgtgtatatgcctttatatcctgaacggatatataaaacgttcatatgctgttacgaagtgaacgtgacactttcaactttgtcgacgtcaagcaatgttgtagcagagcctgccggtgtaacggaattttcctgcgtaacaaaaacgattccgtgaatttcgtcaaaggcaacaaattgaaccgggccgatcatgtctcctgaatccatcacaatgctgatgacagtgccgggctgaattcttgcaaaaatccatctcgccgctaatgaaataccgcttcccaatacagattgtgcgctgagactgtctttcgccgctgcttcatccacttttgcatcaattgccgattccaataaatcttttactttgttttccacattatctcctccatctgtgccgccagataaagcgctgttgtcaaatacaggggctaaaagagtttttaataacttctttttaagctccaaacgatcctcgctcatgcggacatacacctcctttacaatttcaacctcacgtttattcatattcctgattgaaaagattggtataagtcgaatgccgttttgcttgcatttttttcaataattaatcaaacagctgaattttcgaatcaggctttgtttgcctatgcggattgtaagagtatgacatacgttgtatagattaaaaaatgaaggagaggaatattttggattcaggagaaactgtaaaacacgggggttttgaggaggaatttcagctcgtactgcttcttcttcttttgttatctcatcagccgtccggagatcattcagatttgcggcgtcagcttgtaatggcaaaagagcttggggttcctgtgtcgcgcgtcaatctgattaacggcagcacactgcagaacgtaattgtcaaagaagtgctgtcagatttggccgtttttcaaaatccgctcaataatacgagatcaaacgtcgcgatttcaagcatcgtcagctgggggctttttaataacgatatcaggctctgtctctttcggagccgttttttacgttttacagaaggggtgatgggatggaaaagaagatctcaattatcttaacgagttacaacaaaccggatcttgtaaaacaggcgattgaaagtgttttgcatcagacctacagcaattgggagctgtttgtgatggatgatcattcaaatgaagaaacctcggccgccatcagtacgtatataaaagatcatcgcatatattatgacaacagttttatcaatccggccgaacggctgaagtcgacccggtatgccgttttgattaatgatgcgctttcacgggccgaaggcgaatacatcacttatttgacagacgacaccgtatttcatccgaataggctcagccgcatggcggaagcgcttaatcaatgcagcgagtttgatgccgtctattccagccagaaggtgatacatgtaaacgggcgcggaacagaacaattccacttctatcgttttgctgaagaggtgcttgatcaggccgcttttctcgttgatcactgttcagtgatgcaccggagatcattgcttgagcgtgtgaaagagaagttcggcagcttttgggacgaagatgttatgcattggaatcacggagactctgttttttggagcaggctcaacacatttacatcatttctgccgataaaagaagtgttggatacgacctataaaacaccccactcatttcagaacacgtatcaatcgcttccgtctgtcctgatcgacggatcctttgtaaaggggacggatcagaaagtatatcagcttgaccgaaataaaaggaagcctgtaaacgagcgctggcatacgttatacgaaggccggaccgtcgtcattccggatccgtttttatttcaatatgaggaagaggactccgccagtattccgaattttcagctcgtcagggatcagtttcatgtttattttatagaagacggggagaaaaggctggttgatcatagcgcatttcgcttttaccgatttaaacggcatggcatcccggctttagaacgggccgaaatacaatcgcttccggacggtccgccgatcagccggtggacatcggactgtgttcaacatttgcccgggaggatgctgtttcgcattgaacggaaattttatgtttatttgagagggttctccatccgatcagtcatgacgtagcgaaacgattttttgcgaatcagaaggcgatacccatttcctttcagcaaattaaacaattaccaattggaatgccgttctatccggtgtacgatgaaattataagaaatctcaatataacaaaaggttgagagatgcagtcggatgtgcaaggaaaaggagagcttttatgaccgatcaatttgataaaaccgagaagcagtatatagagcttacttccggcattcagaggttcgagcatttcagtgtatatacggacccttttttgccgcagattttttcgcataactttgttcagctgcaccgtacatttccgttagacaaactgctgccgtttctttcgtccgttccgggcatgcttcaagccaattatattcatgtgaaagcgtctccggagcacgcatttccgcttcttctgaaacaaactttggtaaagcagggctgcgtagtggaagatgagctgttttttgcaaggaaactggaaaatggggacctgcaggccggacacccgctcactgcttgggggacggaaaagagcctcgccgatgggtcgtctattatgaacatctatgatgccctttacattggcgaggcggcggccgaacaaaagcttgagcggaaatatcctttgtataaggagggaacggttatgcttgtcgtgtgctacagcgacgcctcgcaaacgattccgatcggctgcggagagcttttcatcaacaaagcagataaaaccgcaaaaatagaagaagtcgcaattctggatcaattccaacgaaaaggctacggatcgatattgatgaatgagctgatggcggcggcaaagctgaacggcatggaaaccgtataccttgtgacgtccgggatggacggtgtaaaccgcttttatgaaaaactcggcttcaaaagatttcggcgcgtgcatacaatttttcattattttcttacatagttgggcattcgcataaaccaattgggagttggcccgcatacaatgccgtatatcgtaagaagaaaggatgatttgcgtatgtacggatacggatatggctacggttgcggcagttttggctatggttacgggcacggcggctgcggaggcggaaccagcacttttgtgctgatcgtggtattgtttattttattaatcatcgtcggtgcggcttttatttgttagactgaaaaaatcctataatgaaaatcagcctgcagagaacatcattttctgcaggctttttgttatttccatgctgaaaaatcagcttgaaaaacattttaatacatattacctttctggagaagggggagaaaatgtgaacatgacgattgaagaattaccagaatccagaattgcttatttccgaaacgtcggagagtatggcggaaagcaaaacaaagaactgatggagtcatttaaaaactgggcgcaattgaatggtctgcttgattattctgtcattttaggaattccgcaagatcatccgaatcgtactcctaaagagaaatgccgctatgatgtttgtcttgttatcaatcaagaccatgtgcctgaaccagcccggatcggtacattttccggagggaagtacgccgttttcttgcttgatcatacaaaagaggcagtcagcggattttggaacactgttttttctgagatcgaaaaaaataatttatcaatcagagaacagcctattatcgaaaggtatactttacaaaaggtgaatcatcatttgtgtgaaatattgattcccatacagtaaagaagacgggaattttccgccttctgcttatactgattcagatcaaaaatgatgggatgagcagataaatagcagaaccgaagaaagaataaaatcaacaataggaatagaatttccagaacgctcttcaggctgtcgggacatttccggcagcctgttttacagaaaggtattttctgcaaaaaactttctgaaggataagaatgcggttattcatctgttcatacaatgaagcaaatgggttttcgaggtggaaagatatggggagctatttaatcaaaccggagcttgacgcaaattatccgtcagtcagtcatggtaagggatcatatgtgtatgatcaggaggggaacaagtatcttgacggagcatcgggggcggtcacttgcaatatcggccacggcacggaggatattatacaagctttaaaagaacagcttgactccgtttcgtttgtgtatcgctcgcaattcaccagtactccggcggaagaactggctttatttctggccgatcatctgccgggcgggctgaattggtcattttttgtaaacagcggctcagaggcagtcgaaacagcgatgaaaatggccgttcaatattggcaggaaaaagggcaataccaaaaatccgtctttctatcaagatggggaagttaccacggcattactttgggagcgctttcattatcagggttctatgaacggagataccgcttcacccagctgcttgaacggtttccggccgtttcagcgcctaatatgtatcgttcagagctgcagggagaggaatttgtgaaagctgcggcggctgaactggaaacggctgttcagcggatcggttcctcatttatcgcgggatttgtcgcagagccgattgtcggagcagccggggcggccatcactccgccggcaggttattatgaagcgcttgaggttgtctgccgcaggcacggtattttgtttattgcggatgaagtcatgacggggctcgggagaacagggcggatgcttgcttctgagcattgggggattgcccctgatatcgcggtgctcggaaaagggttgggcgccggttacgctccgattgcggcagctgttgcgtctgatgacatcattgaaacgatcaagcggggctccggggtcattatgagcggacatacgtacagtgccaacccatactgtgcaagggcggcgcttgaagtgcttcgctatgtcaagaaacacgagctgcttcggcagtcagaggaaaaaggcgtaatgctgaagcggaaattagaagaaatcaaagaccgcagcggggtgatcggggatgtccgcggtaaaggcctcctgatcggggttgaattcgttaaggataaaacgacgaaggacgttttttcgaaaaaacaggccttcaccgaaaaaatcattaaagcggcaaaaaatcggggcctgcttatttacccagcaaagcccggtattgacagcggagaaggagacgccgtcatcatcgccccgccgttcacgatttcatatgcggagctggatgagctgtcagatctattttcccagtccgcagaagaagctgaaaaaatgatgaagaaggattgagctgatatgtctatttttcataaaaaaatcgatattcatgaagcaattgccgatgtcaaggacgaatctgtcatcatgttcggcggttttgggggagtgggttcacctccgtcattaatcgaagcgattttggaaagcggcgttaaagaattgaccgtcatctgcaatgatgccggatttccggaaataggtatcggtccgcttatcgttcataagcgggtaaaaaggctgatcgcttcccatatcggctcaaatcctgtcgcgggcagacaaatgactgacggagcgcttgaggtggaattttcgccgcaagggacgcttgctgaacggattcgcgcaggcggagcggggctaggcggtattttaactgatatcggcattgataacgcaaccgtttgtgaaaacaaagaaaccgtaacgattgacggaaagtcctatttagttgaaaaagcgctgacggctgatttcgcttttgtgtcggcacatattgctgatgaattcggaaatctgacgtttgacaaaacggcgcgcaacatgaaccctctgatggctgctgcggccgaaagaacatttgctgaggcggcagaaattgtgcctgccggcgaacttgacagcgagcatattgtaacgccgggcgttttcgtggagggtatcgtgcaaagtgaaggagtgaagtggagatgggcttgggaatagcggaaagagagagtatcgcgaggcgggccgccagtgaaattacctcaggtatgattgtcaacctggggatcggcattccttctttagtgccgaactttctgccggccggcatggaggtaatgctgcaggcggaaaacggcgtcctcgggatcggcggtagtccggagcgcggagaggaggatgagcttttatgcaatgcggccggatttcctgtcagtacagttaagggtgcttcctattttgattcagctctgtcttttgccatgatcagaaaagggctgatagatattaccattttaggcgcgctccaagtcagcaggacaggtgatctcgccaattggctcgtgccggggaaaaaggtgcccggaatgggcggggcgatggagcttgcccaaggcgcgaaaaaagtggttgtcgtcatgagccacaccgatcagaaaggccggccgaagctggtcgaaagctgttcattgccgcttacagcagcaggctgtgcagatctcatcattacagagaaagccgtcatcagcatagatgatggggcttttgttcttgaggaactgctgaatggcacgaccatagacgatgtcattcaaacaacggatgccgaaatcagattgggagaatgttttcttaaaagggggtctgtccatggatcaattagaaaagaaagtcactgagtgggcggaagaaaacacagcaaaagcggtaagcctgctgaaacggctgatcggggaaaaaagcacgttcggccatgaatttaacgcacaggcagtcgttttagaaaaactgagacagtttgacatggatattgatgtctgggagccgagtgtcaaacaattgaaagagcatccttattttgtatcggaacgcgaagacttccatgaaagcccgaatatcacagccgtaaagaaaggggccgggggcggaagatcactgatactgaacggacatattgatgttgtcccggaaggaaatcccgccgcatggacgtatgaaccgtttacagctgttgaaaaggacggcaaagtttacggacgcggttcaacggatatgaaaggcggcaatacagccctcttgtttgcgttagaagcgcttgaagcctgcgggattacgttaaaaggagatgttctgtttcaaagtgtcgtagatgaagagtgcggcggcgcgggaacactggcggctgttatgaagggctacaaggctgacggggcgcttattcccgaaccgactaatttaaagctgtttgttaagcagcaagggtccatgtggttccgcattacggtaagaggattgtccgcacacggcggcacccgctatgaaggggtgagcgccattgaaaaaagcctgcatgtcatcacagcccttaaagagcttgaacacgtccgtaacgcccgtatcaaagacccgctttatcgggacgttccgattccggttcccattaatatcggcaccgtccaagggggaacgtggccatcatcggtagctgaccgtgtggtgatagaaggcaggtgcggaatagcgccggatgaaacgcccgaagcagtaaaagaagagctggcaagctggctgaaagatttggagtaccgggatgaatggtttaaacaccaccccgcggaaatagaatggtttggggctcagtggcttccgaatgatctcccggatgagcatccgctgatttccgctctggaatcttcttttgagaaaatgaaaggggcaaaaccggttcgtgaagcgtccccgtggggaacggacggagggcttttgcagcacgcgggacagacgccggtcatcgtcttcggtccgggagaagtcaaggcggcgcatcaggcgaatgaatacattgaagtccgggcgttaatcgatgccgtcaaaatcatttctctttttatcatggaatggtgcggggtggcagatgggggtgacagcgctgataaaggaactgagggctgaaagcggagcggccgagattgatgcagaccgtttcaacgagcggatcagggtcattcgttatgacggacagcccgaggcgcttataccggccgttttggcagaagcaaaggaagagggagcccaaaaggtgattttctttgccaagcgcggcgatgagccggaatttgtcaagcatctttttattattgagggtgccatagacgggtattacaacgggcataaggctgttgtgatggtgcgctatttatcagaggaacggagacggtcagattcatatgtatcagaagattcggctgttgaccgtttatatgagacaccgcggcggggaatgactcagacagaaagcacgctgatgttcagaaaagcggacgaagatgatgcggaccgtttaacgcacttatataaacatgtttttcttacctatccgactcctgtttttaatcccctttatattaaaaaaacaatgaaagaaaacaccatctattatgccgcattcgatcaggatcgtctcattggggcggcaagcgcagatatcaatccggttttggggcacgcagaaatgaccgattgcgcggttctgtcagattacagggggaactccgtaacggcacacttgtttaaagcgttggagcaggaactcgctggccggggaatcattcatcttttttccttggcccgtgcagcgtcttacgggatgaacgccgttttgtatcatgcgggatacggctacagaggcaggcttgtgaacaactgccgcatttcagaagggctcgaaaatatgaatatatggtgcaaaactttacgtttggccattcataaggaggaattcgtttgacaaacaaatggtttcagccgaagcgtcactggaaggagattgaattgtggaaagatgtgccggaagaaaagtggaatgattggctgtggcagctcacccatactgtaagaaccgtcgatgacctgaaaaaagtcattcatttgaccgaagaggaagaagaaggcgtcaggatgtctgtaaaaaccattcccctgaacattacgccttattatgcttctttaatggatcccgataacccgagatgtccgatccgcatgcagtccgtgccgctgtcagaagaaatgcacaaaacgaaatatgaccttgaagatccgctgtttgaagatgaagattcaccggttcccggtcttacgcaccgctatcctgaccgcgttctttttctggtgacaaatcaatgctcgatgtattgccgatactgcaccagaaggcgtttttccggacagatcggaatgggggtgccgaaaaaacagctcgatgcggcaatcgcttacatccgggaaacgccggaaatccgtgactgcctgatttccggcggagacgggcttttaattaacgatcagattctggaatatattttgaaaaacctgcgtgacattccccaccttgaaattatcaggatcggaacgagagcgcccgtcgtatttccgcagcggataacggataacctttgtcagattttgaaaaaatatcatccggtctggctgaacactcattttaatacgagcatcgaactgacggaagaatcggttgcggcgtgtgaaaagctcgttaacgcaggtgttccggtcggtaaccaggctgttattttagcaggcattaacgattcggtgccgattatgaaaaaactcatgcatgatttagtgaaaatccgcgtgcgtccgtactatatttatcaatgtgatttgtcagagggaatcggccatttcagagcgcctgtgtcaaaaggattggaaatcattgaaggactgagaggccacacaacaggctttgccgtgccgacctttgtcgtcgacgccccgggcggaggcggtaaaatcgccctgcagccgaactacttgctctcccaaagtccggagaaagttgtgatcagaaacttcgaaggggtgattacatcttatcccgagccggaaaactatatcccgaatcaagctgacgactattttgaatctgtttttccgggaacaatggccaaacgcgagcctgtcggactgagcgccattttcgcggacaaagaggtttcgttcacaccggaaaatgtatcgaggatcgacaggaggaaaacgtttacatcaaaccctgatcatgaaacgctgaaagaccgcagggaaaagagagatgaattgaaagaaaagaaatttattgcacagcaaaagaaagagcaaaaagcaggatcggaagtcggaggtgagtcgccgtgaagccatgcgagtggtgcggcaatcagaaggcgtcagcttgtcaggcggctgtgtactgggagcttcctgacggtacgagagccatagaaattacagaaacacccgcattcgcctgctcctcctgcggcatgacgtatcaggaggaagcggtcatagcggaaatcgaaaatcagctttttttagtcgatgcaaaaaaattaccggaaacactcacatatcaagagctgatggggacagaacggatcttgaaacggaattattttgacttctcctagtcttcttttgttgtaatttcacacttgaattgtataatagtacaacaaaagacagtcatcaggaggggaaacccatgaaatccttttatcactatttgatgaaatacaggcatcccaaaccgcaggacgcaatcagccggtttgcgaatcaggcatacgaagatcacggctttccgaaaacgtcaagcgattatcacgagctcagttcttatttagaactgagcgccgactatttagaaacgatggcgacatttgatgaagcttgggaaaaatatgagaccgaggtgcatcacgcctgacgaaaaaccgcacattgtgcggtttttttctgttgaaatcaatcgcttatgaggtgccgtatgatcaaatcccgcaatgcctttcgttttgatcagcgcgtaaacaagtcttcctgatggcacggatcataaggcagcagaatgtatagctgcagagttcaccggatcagacctgctgccggcggggtcccgtgtaaggagcctcttttcacggagaaataatcaaacatttaaatgaagtgagaggaatcaaatgatctatggtgaggcactgacgtttggacggaaaagggaattttatgtgacaaggttgaagcggattgaagttgtggcttcattgaaagccgaaacgagtttggttcttcatgataaacaagccattgcagatatgcagccggaattggatctccatacatcttcgatgatgtgtttcacggcaaattttgaacatcacggcggtgatattgtcaacatgccttcgggccgggtatttatctttgtgtcatggagaaataaacaaaaactcattcaaaaacaggcgctttttgtctcgtcattgttactgctcattcgatcgagagcgcaatgccatcagacgcttctgttacggtaagtgaaaaaacgcacaagcatgttggggtttttgccattttgaacaggtgcagaaatagatatttcctgtggttttcatgcccatgcgaaattatggcggccggcatacgatagcgtatgacagtccgcggcaagggggagacagcatgaagccagataaaccgaaatttcaagtgggagacatcgtggtcgtcgtgatgtacggaaccgtcggcaccattacgaaggttcatcaaattgataaacattatctttatgaagtcaatcataatgaagtgctttattttgaatcgtccatccagctttataaagattatgagggcgtgatcgtcgatatggaaaaattagatattgaatatgaatttctgatcggcgacgtcgtatatgtaaaggactacggaaaggaattattccgagttatcggtcacagaactgaaatatggagatatttagaggatggctgggaggatattatttatgagctgactcggctgaaagacggagagtggcttgaaacggaggaagaggatctcacgctggttctgagaaaatatgaaatggatcagtttgtgcatcagctgctgtttgtccactatgttggggaagcatctcatgagatcggcgaggataccgtcgcgtctgctcttcttcagtttgaaggcgatgctgatgatcccgatgccctgcatgtgctggcggtatcgattgtagatgagctgcttgatatttataacgattataagattctttatcatttgttcggtgacgaagaatataaagatatgatgaattttgtgctggaaagcctgcgggagcatttcagctagccggcaaaaaaacggacggtgacatataaaaaccagggcagacagccggcaaagatgacaaacgacattcctttcagcactttttccaatacgatatcaaatccatctccgtccaataaagccatcattttcgtcattatcttttctccctccggggcttgtttttttaaaagtatatgagcggacaaaacgtttagaactttcgggtataatttgaacggttttttcataaaacataaaaaaggaggcggtgtttgcatgaaagaaatagatcttgtgattgacacagaagaaatagctgattatttttacagtcagcttgctatgcgcgggtacataccgagtgaagaggaaatcttcgaaatagccgacatcacctttgattatttattagaaaaatgtatgatagacgaagagcttgatgaagactgaaactgcggaaccgaagtgaaaaagcttcggttttttcaatcagctcgggagaatgaaacatggggggaaaacgttgtacaagccagcaagtcttttcgcattgtttattctgctcgcagcagcgatccggatagaagccgtccgggcttttgatgagcgtgtgatagaagcggctgtcaggatcaggtctgtctggctgaatgaattgatgttatggataacggagctcggcacgaccgcggtgcttttgccgcttcttcttttgacaggcgcagctctgtatatgtacaaaaaaacgccggatgttgtttttttgccgcttctctttctcattgaacggattgtaaacataaaaataaaagaattgattgaaagagccagacccgcttttgaaccgctcgtccatgaaacctcatacagttttccgagcggccactccatgaattcggcagtgatgtatcccgtcatcgcttactttttgatcaagcatgttccgtttttcacgaaaagaaagagggccctcaccgtctttaccggagttctcgtcattctgatcggattcagcagaatttatttgggcgcgcattttccgacggatgtccttgccggattcagtctcggactttgcctcgtttcgctttttgcgctctttgacgaaaagtatcatccgtttcgacaaaaatagagacaggaaaaatgagaaaaaacgctaatactattaagaaataagagggagggatcttgatgctgttatcgctgcccgtgtttaaaaaaaagacttgtgcctatgatgtgacgatttttcaaacaccccgctacggcgagaaaaagggatacagggtcgtctatcggacagagctggccgctgacaatcatcaagacgcactggaaagggcattttctgtttttaatgtgcctgatacggtcccaaacgactatcaagccagattcatagcgaccggagacgtcatactcatagacgaaggaagaaaaggaaagacctattacaggcttaaccctgcgggatggagtaaaattaaccggctgctcgtccagccgaggtaagacggagccggctgaagattcagccggcttccgtattgtctgggaaagacagtgttaaggcttccgtttagcggcggaatgctcttttccatgcgcttcatcagctgcaatgacgtctgaaacgggcacgtgattgttctttttctggccggtcacccggttgcgctgttttttgcccattatgttcactcctttttctttaggcttgtcatcccgcatattctgcccaagattgccctgatcaatgctgatgattgtctcttaccgttattcagtgtacaatgggtgggagtttgaataggcaggaggaaaaggaaatgagtgtacatataaacgcagaaaaaggccaaattgcggatacagtgcttttgccgggagatccgctccgagcgaaatttattgcggaaacgtatcttgaaaatgtggaatgctataatgaagtcagaggaatgtacggatttacgggtacatataacggcaaaaaagtatcagttcaaggcaccggcatgggtgttccgtctatctctatttatgtgaatgaactgattcaaagctatgatgttcaaaacttaatcagagtcggctcatgcggagccatccgtaatgacgtgaaagtgcgtgacgtgattttggctatgacgtcttcaacggattcacagatgaaccgtgtcgccttcggcagtgtagattatgctccttgcgcagacttcgaactgcttcataaagcgtaccaggaagcgcaaaaaaacaatcttcccgtagcggtcggaagcgtattcaccgccgatcagttttacaatgaagactcccaaatcgaaaagcttgccagatacggcgtcctcggcgtagagatggaaacgactgctttatatacgcttgccgctaaatacggcaaaaaagcgctgtctatcctgactgtaagcgatcacgtattaacgggagaagaaacaacggcagaagagcgtcaaacgacttttcatgatatgattaaactggcgctgcatactgtatcgtaaacttgagatgagggttatgctgattaaagcagccctcttctttatgcatcgccctgattcaaaaaaagaaaggtaagggtaaaatgaagaaatccactaaatggttctcgctcgctgccgctctcagcgtaaccgcaatcgtgggcaccggctgcagcatttcagacggcgacagccataaggacacaaaaacagcagctgaaacaaaacaatcagatgacacatcaagcaaaaaaacaacgaagacagaaaacagtgattttgtattagagagcaaatattttaatgatattaaagaagtgaacgggcttgagaccattcaaaacccgacaaatacacttgcgctcgtaaataagacatatacgctgccgggagattataaaccgaatgatctcgtaatcccgaaagtcgaattttcttttactgagaaaatcgagaaacgatatatccgcaaacctgccgccgatgctttggcggaactattcagcgccgggaaaaaagaaggttatgacctggttgccgtttcaggataccgttcttatgacagacagaaagttattttcgataatgaagtcagtctgaaaggtgaaaaaaaggcgaaagaagccgtcgcatatccggggcaaagcgaacaccagacggggcttgccatggacatttccagcaaaagcaacggatatgagctgaatgaggcgttcggaaacacggcggacggcaaatgggtgaaagaccatgcgtatgaatacggctttatcatccgctatcctaaaggcaaagaaaatgttacaaagtatgagtatgaaccatggcatttacgctatgtaggcaaaaaagcggcaaaagccatccatgaccatcaattaacgcttgaagaatattttaatgaagtaaagaaagtgtaatgagaagaagcccgcttgaaaaatagaaagcgggctttctttattaccagaagagcagacctccaagcgcaaatccggtaatgaaaccaaggccgataccgtaggctgctccccagcctccccagcctcctccccaataaccgaatccgtaccctctgtgacggccgccgacaggggtgatatacactttgctgttagtcacccgtacgattcttccgacgtggactctgccgtttcgttctgtaattcttgctacttttccttggtgctgccggcaaagatgataatagttttgcatcttttctcctcctatccaacctatctttctatgtcagcttatgatagagtgcggtaaaaaggttggacgaaaacaggaggacaattgccgttttacttgtaagcgacaaaagcgcagtgtcccatatattcacggtacgtctgcataagctcgtaatgagccgtcagcgtatcgtagtgaaccggctgaataacgggcgataaatccatttctgtagtcggctcctgcgcattgttttcatagacagcgggaatgaaatccgctttctgaaagccttgctgaagcaatctctgtttccatgcggtttcatcctgcaatacggtaaaaccgtagaagtcttttatctgcgtgatggcgttttccggcatgggcttttgtaaagcagcttcaatgccgatcagcatgcccccgggtttaaggacccgcaggatttcagacagcgatgaatcaagatttgaaaaggtgagaactgattcggaaagaacggcggaaaattgattttcagcaaacggcagccgctcaagctccgctaaatagcccggaatggttaagccttcagcggcaaatcgttttgctgctttttcaagcataaggggatccttatccacacaggtgacgggatacagcaggtggccgagataagcggccgtctgtcccgttccgcagccggcgtcaagaatcggttcgccaggaggaggagccgcttttgtgagaacggctttggaaaaagcgagcccgccggggtgagcccctccgactccgaataaggacagcatttctaaatatttgctcaaaggccgaatcctccttttttcctcagcatatgttgagagaaaagcataggtttgggtaaacgggaaagaagggcgcctcacgtttgaagttgacgaatgagcgttcgtctatgataataatgtaagaataaaaaggtggtgttttcttgaagcggcaatttaaactgttttttattatattgatcactgcggtcgcagcctcagcgcttacgctgtttatcacgggcaatacgaccattttcggacaaggctcggctgctttgacgaacagcaaatttgagaaattcaataaagcctatgagcagattaaaagtgattactatcaaaaaacagatgacagcaaattagtagacggagcgataaaaggcatgatcagttccctggatgatccgtattcttcttatatggatcctcaggaaggaaagtcgtttgaagaaacaatttccgcttcgtttgaaggcatcggcgcacaagtggaagaaaaggacggcagcatcctgatcgtatcgccgattaaagggtcacccgcggaaaaagcgggggttaaaccgaatgaccagatcttgaaggtcaacggcaaaagcgttaaaggccttaatgtaaacgaagccgtcgcattaatccgcggcaaaaagggaacaaacgtcaagcttgtgctgcacagagcgggtgtcggcgatctgaacctgtcgatcaaacgtgacaccatcccggttgaaacggtgtactctgaaatgaaaaaaggagacatcggcgaaatccaaatcacatccttctccgaatcgacggcaaaagagctgaattcagccattgacagcctcgaaaaacaaggagcgaaaggatacattctcgatttaaggggcaacccgggcggcctgatggatgaagccatcaaaatgagcaacatgtttatcgataaagggaaaaatatcatgcaggtcgaatacaaagacggcacgaaagaagtcatgaaagcgacgaaagagcgcaaagtgacaaaaccgacagtcgtcctcgtcaatgacggcaccgcgagcgccgcggaaatcatgtcggctgcgctgcatgaatcatccggaattccgctgatcggcgagaaaacgttcggaaaaggaaccgtgcagacggcaaaagattacagcgacggttctaccgttaaactgacaatcgcaaaatggctgacagcggacggagagtggattcataaaaaaggcatcaaaccgcaatatcaggttaagcttcctgaatatgcgaacctgccgtatttagatgcgaaaaaaacatacaaatacggggattccggaacgaccgtcaccaatgcgcaaaaaatgctgaaagcgctggggtacagcgtgaatgtaaacggcacgtatgataaagcatttgaacaagcagtcaaacaattccaagcaaaagagaagctgaaacaaacaggtattttaacgggagacacaacggcaaaactgatgacggatctgcaaaaacagcttgcggacaacgatacacaaatgaaaaaagccgttgaaacattaaataagaatatgaaatagtaaaaaacacccgatgcgtcgctcgcgcatggggtgttttttgtttgcgaaaagcccgtcttatgtcgtttcctgttcaaaaaggtggctgttcgcctgaatgaaaaactgtgattgctcatagtgataggtgacttttgagaaatcaaacggctggccgttggttaaatgaaaaatcgtttcaacgcaaagcttaggcgctcctgtaaacagacctaagtactccgcttcttcctcatttaacatccccgcgtacagatataaatctgaaaaaccgcgctttaacccgagaccgtctctaatataatcaaatatggattctgccacgatctctttattcaaatacgtaataatggatttgttgtaaaatgactcttcgatacacaatgtcagcccgtcaatatatcggattcgcttgacataatacacgtcgccgtcaggcggcatattcagattttgagcagcctcaggcgtgggttttctcacttccagcgctaataatttggaagtgacattaaaatcttcaagtgattctttaaatccctgattagaaagcagactgatatacccttttcttttattccgtctgacaaaaatgccgcttcccctcacttgaaacacaatcccctttttttctaataaatctaaggacttggttatcgtgcttttgctcacgttaaaccgggtcattaaggtttgcagcacaggcagtttatccccttgctgcagctgatgttcttctatgtatttttcaatatctatcgcgatttgctggtattttaacatatccattcctcattcatttattgtcccgcttctttcagaattatagcataatcgtttttaaaagccatttcgtaaattaactataattgtttatgtattgataaattataccggtacaattataatgtaaacgtataatatgaaaatgaaggcaggaattcttctacacctgcgaagcggtgcttgaagctgctgcagtgcatttattcggtatgcaagcggcagtcaaataaaggaggatataaacgatggggacattgccaaaagattttttatggggaggcgctctggccgcccaccaatttgaagggggatggaataaaggcggcaaggggccgagtgtagtggacgtcatgacggcaggcgcgcatggtgtgccccggaaaataacagatacaattgaagagcgggaattttatccgaatcatgaagcgatcgatttttatcatcgttataaagaggacatcgcattattcagcgagctgggcctgaaatgtttaagaacgtccatcggctggagcagaatttttcctaaaggtgatgaagcggagcccaatgaggaagggttggctttttacgaccgggtgtttgatgaattgctgaaacatgggattgaaccggtaattaccttgtcacattttgagatgccgctgcatttggcgagggaatacggcggtttcagaaacagaaaaacagtcggattttttgtgaaattcgctgaagtgtgttttgaacgctataaacataaggtgaaatattggatgacgtttaatgaaatcaataataagatggatgtgaataatccgatctttttatggacgaactcgggcgtcgccgttaaagaaaacgaaaacgcaaaagaagtcatgtatcaggccggccatcacgaactgctggcaagcgcattggctgtttcgaagggaagagaaatcaatcctgagttcaggatcggcgcgatggtatcacatgtcccgatttacccgtactcatctcaccccgatgatgtgatgctggctgaagaaacgatgagacagcgctttttcttcccggacgtccaggttcgcggatattatccaagctatgcgttaaaagaatttgaaagagaaggctatcagatacactttgaagacggtgatgaagagattttgaaaaatggccgagtggactacctcggattcagctattacatgtccactaccgtaaaaagtgacgtgataaacgataataccggggatgtggtaaacggaggattgccaaacggcgtggaaaatccttatattacagcgagtgattggggctgggcgattgacccgaccggtttacggtacacattaaaccgcttatacgaccgctaccagattccattatttatcgtggaaaacggattcggcgccattgacacattagaagaggacggttcaattcatgacgcttcaagaattgaatatttatcgtcacatataaaagctttggaaaaagcagtcacatatgatggcgtggatgtaatgggctatacaccatggggaattattgatattgtgtcatttacaaccggagaaatgaaaaaacgctacggcatgatttatgttgatcgggataatgaaggcaacggttcaatgaagcggcttaagaaagactcatttgaatggtataaaaaagtgattgaaacaaacggcgcatatgtatcctaaaggtgtaaaaagggaaggcttcaccgttgtgtgaagccggctttttatcagtaattatgaaagcgcattcattaaaacgggaaggaggtgactgtccggcttttcatttagaatcgcttataaaaataaggaaagggatggtggttcatgttttttaaaaaaagtctgcacatgaccctggtttttcttatgtttttctttttcatatcaagcagcacggaagccgaagtgtatgcggctgatcggaaggcttcagacaaaaacaaagtaagggtgtggttcagttctgaaaaagatccggcttcccgtacgtggtatgacgggccgctggaagtgaaatacgccttagacgaacaaacaccgcttacatggacaaaaaagaaggcttctgactccgccgccgtgtatattgatccgtcgcgccgctatcaaagtgtgttgggcgtaggatcgtccctggaagaatccacaatccataatttatcaaaaatgacacccgcaaaaagaaaagaagtgctgaaaaaactggttgatcccaaagatggtatcggcatggacgttatgcgcataacgatcgggacatctgattttacggcacaggaattttatacgtatgacgatatgcctgaaggccaaacagatcctaagctccgtcatttctcgatccaaaaggatattgatttacacattacagcaaccatcaaggaagcgctggcgataaatccggaactgaaaatcattgcctcaccgtggagcccgccggcttggatgaaaacgaatgaaaacctcaagcggggaaagctgaaagataaatatatcggcgcactggccgtttacttccgcaaatttattgaggcgtacgaaaagcagggaattccgatttatgcgatgacccttcaaaatgaacctttgctggaaatcgactatccgagcatgtacatgccgccgtctcaggagcgcaaactggcgatagccgtgaaaaaagaattgaaaaaacacataattgacacgaaaatttggatttatgatcacaatgcgagcggggcgtggaactatattccgccgattttagatgataaaaaaggaaaccgggcggcagacggcatcgcttttcacgattatgacggtgacctttccgtcatgtcggaaatcggaaagagatatcctgatcaatctattcacttaacggagcggtctgtctgggggacggcaggggcggatcggatcgcacagtatttccgcaacggcgcgtcgagctacaatgcgtgggtgacgatgctcgacagtcaaattaagacgcatcattggataggcaccccggacccgacgctgtttattcaggatgctaaaaaccctgaccgctattggaatatcccgatctttcatatgacaggcaacttttcaaaatttatcgagcgcggagccaaacggatagaaagtaattacggctccaaaaacacagtctcgaatgtatcgttccttaatcctgatcaatccattgtgacagtcgtaatcaaccagacatcttcagaacaaaaattccatgtcgtttcagaaaatcggcagtttgaagccgtcatcccggctaaaaccgtcgccacctacaaatggcagcacaaaaagtaaaaaagccggcacatcgatgtgccggcttttttctgttaagcgcctttttggttcagtttatcagagggcgctttattgaataaaccgtctttgacggcgtttgaagacgctttttttacaaaaaacgggttaaggataataacggcagccatgttagcggtcaacccccaaaacccttcatatataccgtgggcggattgggtgatatttaccgtgaatgtcacgataagaccgacgagaagaccgataattgtcgcttctttcgtttgattcttccaaaacagactgacggcgatagccggaaagatctgaaccatgccggaaacaccgagaagctgaagggtaacgagcgcagtcgggaacagcataccgaataaaagcgcgagcccgatgacgacaaataccattgaacgggtgatcatcgtcagcttgcttggtgacacattcgggtgaatcaaatcccgatataagttattcgcaaataagtttgatgctccgatggccatgatagagcagggaatcaatgacgcaagggcgatcgtggagtaagcaaatccctgtgcgactccgccgtaagacgtttgaatcagcttcaataaagcgagccgcggattggtatcttccggaaggacaagaaacgcgataaagccgagaaaaataacaagaatcaaaacaatattataaagcggcagaaacatgctgtttttgcggacggcatctgcgctttttgccgtaaatacaccggttgccgcatgcgcccacataaagagcgccagcgcagatacgatggaagctgtgataaaccaaggaattcctttcggccccgagtccggtatcgtcagcatttgcggcgctttttcagccaaagtgtgaatcatcggcgtccagccgtgaaaatggatcagcgggagtgagacgaccataaacagcataatcacccacaccagaatgtctttaataatcgccgtaaacgtcggccctttaattccgctgaaaaaagtatacagcgctacaagaataaaagagatgatgacgaccatattgacattaatgacacccgttccggccacctgaagcgtatcttgaatcccgctcagctggagacaaatataaggaatgagcataagaacgccgacaatggcgacaagactggccaaaagtttactgtcaaaacgctcacgggcataatcggcaagcgtcgttaatttgtgaatttttgccactttccacaatttcggcagaaagaaataagcgataaaatacgccaaaacagaatacgggattgcaaaaaaagcaacgcttccccctgtgtaggctgtgcttgttaagcctaaaaacgtataagccgtatagagatccgcgccgactaaaaaccagacgaggagccccccgaaccgtctgccgccgacagaccattcctcaacagaagtacgtgatgatttgtctcttccggctataaagccgatacagacaacggttaaaacgatgacggctgtaatgatcaatgctgttatatttgcgggcatcagtccagtcctccttgtttcttctgcagcctataaataagaaacgaacataatggagtgactgcgatccataaaagcagccagaaatgaaaaaagggcagcccgataatgatcggatgaacccgattagcgactgacagcagggccagctggctgaaagggattaagatgagaacgaaaattagtgcttttctgaccatttactttcctcctgaaacttgataatgctccttatcatagcaggtgtcagataagatcacaagatatttttcagaaaaaaaagaattctattacttttttaactgaaacactttagttgcatcttcattcatattaaattagaatagttaatatctcgaaatcaagatatttaggagtgaatacattgaatacacaaggattgcaccatgttaccgcatttgcaaaagatcctgctgaaaatcttcggttttatactgaagtgctgggtttgcggctcgttaaaaaaaccgttaattttgacgacccggccacttatcacttttatttcggcaaccaaaacggagagccgggcacgatcattacattttttccttttcagggaagccgcccgggaaccgtgggaaaagggcaggccggaagaatttatttctccgtgccgaaaggagcactcgcgttttggaagcgccggcttgaagaaaacggcttgtctgtaaaagaacagatcatgctgtctgaacaagtccttctctttaatgatacagaagacctgccgcttgccataatggaagatgaaagaagcggacagagtgaatggactccttcgggcattactgaaaaagaagcgatcacaggcatgagaggtgttcttctgtactcgtaccgtcctgaagcaaccattcaatttctcatagaacgcttcggttattcaaagacaggagaagaaaatcaaattgtcaggctgcaatcggaggcaaggatcggacatattatagatgttgaccttgcgccgaaagaagcaggtgccggcggttacgggacagttcatcatgtcgctttccgcacgagcgaaaaagagcaggcggagtggaaggatattcttgctgattctcatcttgcttcatctgacattcttgacaggtcatactttacttcaatctatttcagagaaagcggcggcattttatttgaaatggcaactgacgaaccgggctttatgacggatgaatcctttgaaaatctcggaacagagctgaagcttccggaatggctggaagagcatcgcagtcagattacagctgttctgcccataatggagaaaggagaatgatgatgaaacatgtgtttgaacagggaacgtcagaaaatgttctgctgcttttgcacggaacgggaggaaatgaacatgatcttctgtcgctcggacgttttatcgatccgaacgcaagtctgctgggggtcagaggatcagtgtcggaaaacggcatgccccgtttttttaagcggctgaaagaaggggtatttgacgagaaagatttaattgaacggacggaagaattaaagaattttattgatgaagcggcgcaaatgtacgggttcagcagagaaaacgtgattgctgccggctattcaaacggcgccaatattgcagcaagtcttttgtttcattataaagatgtactgaaaggagcggttctgcatcatccgatggtgccgatacgcggagtgaagctgcctgatatggaagggctgcctgtgtttatcggtgcgggaaaacgcgatcccctatgtacaaaagaagaatcggaggagctttatcagtatctgacagatgctcatgcatccgttgctcttgaatggcaggagggcggtcatcagctcacacagcaggaagccgagcaggcacgagcctggtacagtgagcgattcctataaaaaacccttagtctgcttaagcggactaagggtttctttcatcttacagccaagttgacactttagatacaggcagccggttgcttttatgcgccggcttaacggctttaccgattgaaatcagcatgacgggcacgaaacgctcgctcacgtcgaattctttaacgaattgctctttattgaatccgccgatcgcgcaagtgtcgtagccttttgctttagcggcaagcatcagctgcatcgctgctaaagaagcgtttaaaaatgctgaatcgcgggcaaactgatcattttggtatgcaccgttaatctggcctaaaagcgtttgtttaatctcttctgtgatattgccttgctcagccagttcagcataaacgtcttcaccattttcatttgcttttaagtcgcctaatacggcaataactgctgatgaatcaataatctgtttttgattaaaagcaaccggaagcagggcagcttttgcttcatcactgtgaaaaacttgaaaatgccaatgctgaaggttccaggcggaaggcgcttgcgttgtgatttcaaggagttctgtcaattcctcttttgtaatgaccgcgtctttatcgtattctttaacagatgcgcgttcctttaaaacgtctaatacggatgtcatcatgtttcctccttcggataaacgtgttatcataatagaaaagttagaagcttactaaatgtaacttgaaaactaattttaatggatcacaaaaaacttgtcaattcatagatgaagggatgaattcacgtgggatatacaatgtgtcctaaaatggaatccgctttttctcttttgggaaaacgctggaacggcctcattatccatgtactgatggacgggccgaaacgatttaaagatatgaccgaaacgataccgacaatcagtcaaaaaatgctcgcggagcggctcaaagagctggaacaaaatgaaatcgtcgagcgtcaggtgctgccagaaacacctgtcaaagtcatttataaactgactgataaaggcatggcactgcaagccgtttttcaggaaatgcaaaaatgggcagacagtttttgcgagcccgggggatctgccaacgacacatgtgatgaataataaaggctgcccaaggcagccttttcttaatgataatgtttaatcgtcataaaaaccattaatatcaaaattgttcagattgaggttcaagccttttaattgatttaataaagcatcgaatgtaaggaaatgatcatttttacattccgccggaacatcatctggagaaaatagttccattcctccctcaatccactgtttccggtataactgaaatgccgcttcaattaaatgatcaggcgttacaataaaccctaagcttacgtcatggtcctcactgtagccgaattcaaacccgcagcaagggcagatatcaaatgttttttgatattcgccgttataaacgggacttgtctctaatcctttaaatccgcatatcaaacaaggatacaactcactaaccaacatccatccctcttttattcagtttgaaaacatccaaaacaagcagggaggccttttacagtttcccggttaaaaactgagcctcaccgagcccgaagctccaatcggcgttcccgttttctgtaacggaaatcatgacgtcctcgggtgatatgccgcattctgttttaagctgatcagccatcagttgatataacgtttctttctgatgttcggtgcgcgctttgctgacaatgctgatgatgacaagagctttgcttcttttgaaaccgagcccggtatcttcaatgataagctcatgaggccgatgctggtgaacgatctgataacggtccgttactgggacgtcaaaagctttaaccatggcgtaatgggcggtatccagtaacttttttaatgctgcgtcatcccggccttcaataacgtcaaaacgaagtaatggcatattttattcccctgatggttttataatatcgtaacttgtaaaaaaagtataacagttaatcaaaatataatcaaattataaccaaaatgtttacatattaatgcaatattaaagagaggcacatgttgttacaatcgcccaatcaatttcctcattttatgaatacgcttaagaataggcagacataaaggaggaaaaacatgtaccctcgtcatgcattgtatcgcgggaatttcggtcctgccggatttccggcgagaagtccttttttgttcggcgctcctttattcggcggatttttaggcggtcttctcggaggcgtgattgccacaggttttacaagaccccgctatccgtacgggtttgccggttacggatacggaggcgtcccatacggcggtttcgggccgggagccggcggttatccgccattttattaagaaaaaacggcctgcatcgcgcgggccgtttttttatcttaaaatctccacttccgatagattgtagtcttcctgttttgaaaacataacttcaatcatcccgtctttatagactgcttttgttcctttccgtttgacgaggctcggaagtacgatttctttttttccttctcccaggctgctgttctctacaacgaggctgtgtgacgtatgcttaatcctgatacggtcgagttcctcttgttcggcgggaattttcgcaaaaacatgatcggatgtttcaaacaggtcaatttccggcttgggcggttccgcttcgaccggatcggcctttttggacatcgggtcgcgaaaagggaactgtccggcataaccggcgccgaatacgctttccatcactcggttgacatatgtctcgacatctttcggatcagcatttttaaacgtttctttagagaactgattttggaagggaaaatatctgttccaatcaaacacggcatctcaccctttcttaacggacaacatagtatatgcccgccggaagcttcccgtgatataatataatctgtttacagaaaggaaggggaaggccgtgcaagggaataacgtaagaaaaggaatcatttataccgcttgttctttcgtcatgtgggggctgtttccggtctattggaaacttcttgaacaaatacccgcattggacattttagctcaccggattttatggtcatttgttttcatgtgtgtgcttttaactgtgcttaagaagtggaaaaccggatggcgtgaactgcgtcttttgaaatcggaaggggcctgctggcgctttttttcgcttccgttttaatttccgttaattggtttgtgtacatatgggccgtcaatcacggctttttgcttgaagcaagtctcgggtactacattaatccgctcgtttccgttcttttgggcatcctattcttaaaagaaaagcttaacaagatgcaaacagcagccgtttctattgccggggcggccgtgctcatatctgcgtttcaatatggcgcggttccttatatcgcattgctgcttgcattcagcttcggtctgtacggcttatgtaaaaaaagaacccgcatgtccagcacgatcggactgacgctggagacgcttttgattaccccggctgcacttatttatttaggatatacagctgacgggagcacttttgggtccttggggcaggaacatgggcgctcctatttttcgcaggcgtatttacggccctgccgctgttattgtttgcagagggggcaaagcgtctgccgctgtatcaagtcggcattttgcaatatatagcgccgaccatcacccttatgcttggcgtatttgtgtatcatgaaccgttttccgggcaaaaagcgtttaccttcatttgtatatgggcagcattgcttttgtttaccttttcacagataaaatggaagcggccgataaaaagccgctaagcctttcgctttccagcgatagcttaaattatgtataatcattacgagtatgtaaaggagctgtacaatgggcactgataaagacatagcaaaagcctatcaggcactgtggaataaccgcactctcccggcttcaacccttgaagaagcggaaaaggcgattgatcttgaactgcttgatcaaagaacacatccgaggctccggaagtcacccgaggaaaagtttgctctggcggtgcagcgaattgtagattcccggctgcggccgattgagaaatatgaattggttgaactacatacgaagcgtttgcaatttttaaaagaagaaagaggggagcagctatgaaagcgatcataaaagaagatgtgcaaacttctttagagcgatatgccgatcgtcctgtatatatccatttggaaacaacgaccggttcttattcagcgcatctgaatgagaaaaatatgacggttgtagcctatatacgcaatgcaaaagtgacgtaccatcaggcgaaaatcaaaggaaacggcccgtaccgcgtcggtttgaaaacagaagagggctggatttacgcagaaggtttgactgagtatacagtagatgaagaagaccgtttgttaatggcggggcatctgccgggcggaaaattggcgatttcgcttcaaatcagcgaaaagccgtttacagtttaaagaaaagggtgaaaatcatgaaagaacatgtactcgtcatcctgcctcaccctgatgatgaatcatacggagtggcaggactgattgctttacacagacaaaaagatattcccgttacgtatgcatgcgcaacgcttggcgaaatgggccggaacatgggagatccctttttcgcgaaccgtgaaacactgccgctgttaagaaagcaagagctgattgacgcatgcaaagcaatggacattactgacctgagaatgctcgggcttcgtgataaaacacttgaatttgaagatgacgagtggctcgcggatatgatggaagagattatcgacgatgtaaaaccgagtctgattgtcacattctatccggagcacggcgtccatccggatcatgatgcatgcggcgaagcggtcatcagagcgctttacagaaagaaaaaagaggaccgcccgcgcacgctttgcatggcaatcacccgcaacagggaggaagccgtcggcaagcctgatgtcattcttgatattaaagaggttgccgatattaaaatgaatgccttaaaagcgcaccgcacccaaacggaaggcatgctgagagagctggaagaaaaattaaaaaataacgagccggttcttcagacatggtttgaagaagaagtgtattggacatatccgtggaaagactgataaaaaaagggataaggctgaaatgccttatccctttttttgtgtcagatcggaagcgatcgcttccgcaagcgaagaccgtattgataaatttgaaaaactcagtccgagctgcaccgcggtttgggcgatttcaggacggattccggataacgtcgctttcacgccgagcattccgagtgattcaattaaggtgaaaagctgttgggcaaccatcgtatcaatcatggctacgcctgataaatcaatgtacagctgcgtgatgcgcttctctgaacactggtgcagcgtattctccaaaatcattttggctcttgccgtgtcaatatccccgatcagcggcagcagtccgacattgtcaaaaagcacaattaccggcgagctcagctctgtaatcaattctttttgcgcttcaagctgaatgtttgtgtttttatacatttcctctatgaaaatatgaatgaccacatcaaacgatttaatcagcgtatggaatatatcttcggcatcttcttctgtcacggtgtctgaatgaagtctggtaaactgctttacatggccgacatacaaatcacgaactctgataaactcgcgaatgatgtaatggatgggagtttttaaatgttctttatcccgtgcggcttcaaacgcccacttttccaatgccgctgtatatacttccttctcttcagaaaaaatccgattgagttgataattaaacgccagattttgttttttcagatttgtgagaacagccgggtcagtagaagcataaacagaatcaggatccgtatcatgaagggtatcaaaccatgtctgactgatatcctccgcccgttcggttaaataatcgtacagcagtttatgtttcggcattgctgctcctcctttataaaatcatcatttttttcacataacgcttttgcagcttcatcagtctgaagaataaaccgacagctcctgcggcaagtcctgcaattaacccgatccagtagccgtatgccccgaggctcgtgtaagtgccgactgcgtaaccgagcggaagcccgataatccaatacgaaacaaaagccgcaccgagtgtatagttgacatccttatatcctctcagggcgccttgtatcggagctgctacggcatcagaaagctggaaaaacagcgcatagattaaaaagtgctgcgtcaacatgagcacctccggatctgatgtatacattccggcgatttgcggcctgaacagtaaaatgaaagccgccgtgcataaagaaaaacaaagggccatcacaatgccgatatagctgtatgaccgggcatccctgtaacgctttgcgcctgcttcaaagccgactaaaatcgtcatggccatggatacgctgagcggcagcatatacaagagggaagcaaaattcattgccgcctggtgggatgcaatcgtcaccgtccggaaatggctcattagaagtgtgacagccgcaaaaatgctcgtttcaaaaaataccgcaaaaccgataggcaaaccgattttcaaaagttttctgcattcagacggagaaaaacggtacagtttccgaaatacagagtacccggcaaacggctcaaatctgaagacgataaaaaagctgacggcgcaaatacaccagtaagtcagggcggaagcgagccccgcaccgactccgcccaatgccggcatgttgaatttcccgaaaataaatacataatttaaaacaaaattaataggcaatgagcaaagcgtaataagcatcgtgactcgcgttttgccgagtgcgtcaatgaacgagcgcaaaacggcgtacacaaacaaaggaaaaataccgagggataaaaagcctaaaaagtgtttggcgatcgtccggacacgaggttccaggcccaaatgtcccaagatcatatcaacggtgaaaaagccgaccaggataaccgccgcactgagaatggccgctacataaacggcctggatgacggaaaacggcacttccttttgtctgccggctccaaacagctgcgaaacaacgggcgtaacggccattaatattcctgcaaggcccgtatacaccggcgtccacaggcttgaaccgattgcaacaccggctaaatcggcggcgctcactttccctgacatcaccgtgtccaaaaaggtgatcagggcaaggcccgcctgtgtgattaaaatcggaatgaagatatgtaacagctgtctgaccttttggccgatcgtgttcgtttctctcaatttaggttccccgtttctttattttaacgagagaaattataacattttatgtataaaaagcaatgaaagccggcctactcttttttatccggtttcggctttttaaacatcttggcataaatgaatgaaagtgaaatgacccctaaaaaggtgcagatatattgcatcagccgtgcaaattccatatgatttcgcctcctttcatgattatggtgtacacagcggcgcatatccatgcgcgcgatgcagaaaataagggaaaggagatgatgtgacatgcgccacactcaaatgacggaaagcgcgtttaccgctgccgttcaaacgtacttgaaacaaattaccgaggatgccggaatgatactgcggacattggatgaaaaagaccaatgccttctttgcgaattagatgaactgggacatacgtttcaggaaatgcaggctgtcgcttcgtcgttttacctgcagtcatatatcgaacattttacgccttcctatacagagctggcgagggccgtgcagcatctggcggaagaaaagcacggagcgctgattgtgattgaacgtgcagatccgctggacggaatgatacaaaaagggaccagcctgcatgccgagatcagttcagctttaattgagagtattttttatcccggcaatccgcttcatgacggagccgtattggtcagagaaaaccgggttgtatcagcagccaatgtgcttccgctcacaacaaaacatgtcgatctcaaatacgggacgcgccacagggccgcgatgggactttcggccgtgactgatgcactcgtgctcgttgtttcagaagaaacgggaaaaatgtcttttgctaaagacggcggactgtatccgcttgtttcgccgcgggcgcttcatacgaaataataagaaaatgggaatattgtacccatttaatattaataaggtgaacatctttacctttttctgtattggtgttatcgtttaaatatacataaaatttaaaagaatagggagtggaaagatggcaaatgtattgatgatcggctttccgggagaaggccatatcaatccgtctttaggcgtcgtaaaagaactgaaggcaaaaggggaacatgtcgtatattacggcgtgaaggaatatgagcacaaaatcgcgtcaagcggagcggaattccgtgaatgtgaagatttccgaaaagatgaattcggaaaaaacgcaacgggtgatgaacagcgggatgctaccgagtttttactgttaatgattgagacttccgaaaaagccgcactccgtattcttgaggaagtaaaagatgaatcatacgactacatcctttatgatcatcattttctggcaggaaggcttgtgagaaataagctgaaactgccggcatattcactttgcacaacatttgcaatgaatgaagcatttattaaagaagtgttttcaaatacaaaccttatatcagaggaatcatctcattatccggcttataccgaagcggtcagccggcttaatgaagaattcagcgcagacattaaaacgccgtatgatattttctcaaatgacggcagaaaaaccatcgtatttacttcaagagcgtttcagccgaaagaagaagagtttggcgattcttatctctttgtcggtccgtccataactgaaaggccggcggctcaggatttcccgtttgaccagcttgaaggagaaaaagtcctgtttatttcaatgggcacgatttttaacaatcagaaggaattgtttaataaatgcttaaaagcggtcaggaactttaacggaaaagccgtcatgtcaatcggcaaacatcttgatccggcggagcttgatgaaattcctgagaatgttattgtaaagccttatgttccgcagcttgagatcctgaagagagcggacttatttatcactcacggcggaatgaacagtacgagcgaagggctttactacaaaaccccgatgatcgtcattccgatgggagcagatcagttcgccgtcggaagccaagtggaaaacacgggcgcgggcaagatgtttaaaaaagaagatgtaacagcggaactgctcactgaagcaataaaagaattgagcgaaaatcctgaatatcagacaaaagcttctgaaatcggagaatccctgaaagcggccggcggagcacagcgtgcagcggaattgatagcagaagacgtgaaaactgccgagacccgggttctgtaatcagccgtcacccgcttcctttataggaagcgggcttttttttgtttgtttttcgggaggattttcacgccgtgaagagaattgtatgaaaaacagacaagaaaggtggaatgtcgcggaaaaaagccatgttatgaaaatgattccaaagtcttttgtgaaatgttctcaatttatgtaaaatgtgtggcattggtgatgatctaagaccaaatgaatcggaattaatgtcgacttctgaatgaatcctgcataacaggcggcgtccaaagaaaaggaacgtccctttcagcaatgataaataggaggtttttcgttatatgaagaaaaaaatcgcagccggactggctgtatctgcagtaatgacttcaaccttcgccgtgcatcccgctgaagcaaaaaccattcaagtaaaaagcggcgactctctttggaagctttcccggcaatatcatacaagtatttcagccctgcaggcggaaaataaactgaaatcaacgatactccacccaggacagcggctgcacattcccgacgggagcggcacacataaaacggggcaaaaaggaaaacgaaacactggtgcttacacagttacatacggagactcattatgggtgatcgctaaaaaataccgaatgagcgtttctgaactgagaagcctgaaccgtttgagttcagatatcatctatccgggccaaaaactgaaaattaaagggtctgccggcggcacggacggaggcggcagacagacaaagcctgataaaggcgcatcagggacttacactgtgaagccgggtgactcgctgtggaaaatcgccaatcaaaccggcatcaccatcgccgaactgaaaaagctgaatcaattaacatcagacatgctgtatccgaatcaagtattaaagatcaaaggttcttcacataacggaaacagcggcacaacaccgccatctcattcaaacccttctgagaagccatccacttacaaagtaaaagcaggcgattccctctggaaaattgctaatcggttcggcatcaccgctcagctcatcagagaaaaaaataaactgacaactgatgtgcttcaaatcggacaggttctgttgattaacggaacgggaaaaacagaagatcctgtgcggcagccgggtaacaaaccggcaaagccaaacaagccaaatactcccgaacctccggtgacagggtcaaagattgacagaatgataggcgaggcgaaaaaacatgtcggcgtgccttaccgctggggaggcaatacgcctgcgggcttcgattgcagcggttacatctattaccttttaaataaggtaagctctgtttcccgtctgagcacggccggatattggaatacgatgaaacatatcagccagccgtcagcaggcgactttgtcttctttacgacatataaagcgggcccttctcatatgggaatgtatttaggcggaggagattttattcacgcaagctcctccggggttgaaatttcaaacttaagcaatccatattggaaaaaagcttatttaggagcgcgcagttatttttaaaaaaaagcctttcggggctttttttgtttaccattttcacgttttgacaagactgatgggtaaaaaaataagggggaggaagcatgaatcgtctcttgctttttctcatgctcgcatcaattacgctttgcggctgcggggcgagacccgctcctgctccgcccaaaaaacatggggaaagccgcgcattggaagcatctgcataccgtgagcatgccggactcatcaatcaaaacggaaaaacgatcggatatatcgaagtgagggaatctgatgatgaaggatcagacattcatatatcagcgggacatctgccgcccggcgcttctctcggatttcatatttatgaaaaagggacatgtcaggcacctgatttcgaatcagccggcggtccgttcaaccctttgaacaaagaacacggcttcaacaatccgatgggtcatcacgccggagatctccccaatcttgaagtgggggctgacggtaaagtggatgtcattatgaacgcgccgcaaacttcattaaaagaagggagcagactcagcctgctcgaccgggacggaagcgcgttcgtcattcatgaacatacggacgattatttaacaaacccgagcggaaattccggagccagaatcgcctgcgctcccctgacaaaaagcgcccgcagggaatgagcccttttgtattgagtatacaagggcttttttagtatactcggttatggaatacaaatggaaaggaaacatcacctatgacttcagaattacagcacctatcacttccggaagatatacaaaacaaactgcaggcttatcaaaatcatcccgtttcccaagaattccgggatttaatcggatcatcaggctatgaggccgaagataaagcgattgtattcgatgccgtcatcgctttgacaatgggaaaaaatatcttattaaaaggaccgacgggttcgggaaaaacaaaattggcggaaacgctttcgaactattttcataaaccgatgcacagcgtcaactgctccgtagacctcgatgcagaagcgcttgtcggctataaaacgattgaaaatgaacaggggcaggcgacaattgaattcgttcccggacctgtaacaaccgcaatgaacgagggacattttttatacattgatgaaatcaatatggcaaagcctgaaacccttccgattctaaacggcgtgcttgattacagaaaaatgatgacaaatccctttacaggagaagtgattaaggcaagcgaaggattcggtgttatcgccgcgattaatgaaggctacgtcggcaccgttccgctgaacgaagcccttaaaaaccgttttgtcatcattgatgttccgtatattaaaggaagcctcctgaaacaggtgctgacctctcagtctgtcttaaaagatgagaaattaattgagcgctttatgacgctgtcttctgatttaatcgcacaagcgcataacggacaagtgtcagaagaagcggcgtccatcagggctctcatagatacgtgcgacttggctgcgtacatcccgccgaaacgggcgattgaaagaggcatcgtggaaaaacttgacgacgacagggaaaaagccgctgtcagaaatattgcagaaacgctgttcgaatgagggatatacaatgaagtttatcaaatttaacgacagcacgattgattcgtttttgttcatgatgctgactgatctggccaaaacactgaccagaagcagtgaagttgaagtggaatacggcgtgcagtcttactacaatccctttgaaaagaaaatttacatgagccacttttggaaagaccgatcagccggggatatggaagccggcctgaaaagcgatgtctatttgcgcgctgtcggaacacgcagcagctcatttcgggtatttgcggggtttttaaatgacgttcaccggcacttcacccgccaaagctttgccaagcagctgtttatgctgcttgaggatatcagaattgaagagcagatcaaaaaagaacggccgggaacgaaacgtgtttttcagaagcggagggagatgtacaggaaatatttcacgacgcagctgacattgaatttagaacggagcattttcaccgacgctttgtattgcgcgatgtttgtcaagctgacggctgagtctccgcttgaaggcattccttccatgcatgaaaatattgatatgatgataccgtatattgaacgtcagctcatccgggtgtatgaggcggattctacggaacaaatcgcaacaataacggaagacctcatggaaggccttgatgaagtgcttgagaaagatatgctgaacacatacttttttctgccggaacttgattacgaaaaagcggctgaagagcctttattcgaaagcgtaaaaaaagcgccttcgttaagtgacgatctcacgctccctgagtcttccgacggagatgaagaaatccttgaagagaaaatgaatacgtggcaccgggaaaccgaagcgccgtcaaaaagcttccttcaatttgatattgagcacggcgcgaaatcagatcttgggaaagacgcggccagagaaggcgatgacggtgaccaggcgctcggctccgttcaaggttccgcacgtcagacgaaaagagaggattactctaaactggaagcgcttgaatccattcaggatgaacatgagggcgccgggctggctgacggaaaagaaaacaaatttgccttcccggtttatcaaacgcctcaaaaagcgtctcctgaagaggagcagtcttataaagaacaggcaaaaacgatagaatcatatcaaaaacgcctgaagcagatgatacaaaaaacacttgagcacaaaaaaacgctcccgcggaccgaccttcacgcaggccggctgaatcgcaaactgatccgctattttacggaacggaacccgcgccttttctataaaaagcaggacccgtcttcagacattgacgccgtttttacattgcttgtcgattgttcggccagcatgtttgacaaaatggatgaaacaaaaagagggatcgttctttttcatgaagccttgaaatcagtgtccgtccctcaccaaatcgtcggattttgggaggatacaaacgaagcgaccgaaacgagccagccgaatttcttcaataccgtcattccgttcgaagagtcgctgctgcaggctgcgggtccgctgatcatgcagcttgcgcctgaagaagataacagagacggatacgccatcagacaaatgacgaaacagctgatgcggcggagtgaggcgcaaaaatttttaatcgtgttttcagacggagagccggcagcattcggatacgaacaaaacggcatcgtcgatacgagcgaggctgtcatcgaagcgagaaaaaaagggatagaagtcataaatgtttttctgtccaatactgcgatagaagaatcccagatgaaaaccattcaggatatgtacggaaagtacagtatttttgttccggatgtcgatcagctgcccgatgtgctgtatccgcttttgaaaaaactgcttcataaaagcataggataggctttttcctatgctttttcgctttttattttaaaatgatttaattttttcggtattgatctgttttttttactattttgtgaacaatcaaggtagaatccaaacgcaatcagtggtaaaatatccttggaagcgtttttattacataattttgggcacagcgttcaaaagttatttcaagatagtgaattgatcacttgattatctaggttgggggtaatattcaaatgtttcaaaataatatgaaacaaagaatgaattgggaagatttttacggaccgaacctcggctacgcactggagctgtacgaccaatatgctgaagatccagacagcattgatccggatctgaaagacatgtttgacgaactaggcgctccgccaagccaaataaaagaggcatcggaaacaaaggaacagggacgcgtcaccgcagatctgattcaaaagatcgcagcagcagttaaacttgcagaagatattcgaacctatggccatctgaacgcttccgtcaatccgctcagaaaggatccgaaaaagagcgagctctttccgttatccgagtacgggcttacagaagaagaaatgaaagcaatacccgcgtctgtcatctgtaaagacgcacctgccaatataacaaacggcttagaagccatccagcatttacgcaatacctataaaagaaccatctctttcgagtttgaccatgtgcatgatttcgaagagcgcgcatggattacaaaaatggtcgaatccggcgaactgttccggaaaaattcaccggaaaaactgtcagccgttttagaaagactgacggaagtagaaggatttgaacaatttttacaccggacattcgtcggtcagaagcgtttctcaattgagggattagacgcgcttgtgccggttcttgacgacattatcgcccagtctgtgaaggcgggcacaaccaatgtcaatatcgggatggcgcacagaggccgtttaaatgtgcttgcgcatgtgctcggcaaaccgtatgagattattttctcagaattccagcacgcgccgaataaagaccttgtgccgtctgaaggatcgaccggcatcagctacggctggacgggcgatgttaaataccacctcggtgcagacagacagcttcaggatgctgaaaccaaaagcgcgcggattacgcttgcaaataacccgagccacttggaattcatcaatccgattgtggaaggaagcacgcgggcggcacaggaaacaagaacgcaaaaggggtacccggttcaagacgaaacaaaatcgctcgccattttaattcacggtgacgcagcgttcccgggagaaggcattgtcgccgagacgctgaacttaagctcactgaaaggctatcaggtgggcggggccattcatatcatcgccaataatatgatcggctttacaactgaaagcgatgaatcacgatccacaaaatatgccagtgatttggcgaagggctatgaaattccgatcgttcacgtcaacgcggatgatccggaagcatgcctgtcagccgttaaatttgcggttgaataccggaagcggttcaataaagatttcttaatcgatttaatcgggtacagacgatacggccacaatgaaatggatgagccgtcaacgacacagccgatgctgtatgatgccgtcagaaaacacccgactgtcaagcggatctttgcggaaaaactcgtaagtgaaggactgatcagcgaggaaaaagcgcaaaacatcgaaatggcagtgacaaaacgaattgaagacgcctataaaaaggtgcccgccaaaaaagaagacgccgtacgggaaattgaattgccggagccggtgtccaacggttttccagacgttgacacagccattgattttgatgttctccgcaagctgaatggcgaacttatcaactggccggaatcctttaacgtgttcggcaaactgaaaagaatcctggaaagacgtgcaaaagcgtttgatgatgaccgtaaagttgaatggtcattggctgaatcgcttgcgtttgcttccattttgaaagacggcacgccgatccggctgaccgggcaggattcagagcgcggaacgttcgctcaaagaaaccttgtgctgcatgacagcgaaacaggagaagaatttgttgctctccatcacttagacgactgcgcttcttcatttacggtgcataacagcccgctctctgaaggatcggttctcggctttgaatatggatacaacgtgtattcgcctgaaacgcttgtgttgtgggaggcgcagtacggggactttgccaatgcggctcaagtctattttgatcaattcatatctgcaggacgggcaaaatggggacaaaaatcagggctggtcatgctgctgcctcacggttacgaagggcagggccctgaacactccagcggccgcgtcgagcggttcctgcagctggcggcggaaaacaactggacagtggccaacctgacaagtgcggctcagtatttccacattttaagaagacaagcgaaaatgctgcttcgtgaggaaatccgcccgcttgtgatcatgacgccgaagagcttgctgcgcaacccgaatacggtatctgaagtgcaggaactgagcgaaagccgattcaagcctgtctatgagcagtccggtctttcccatgcttacgaaaaagtgactcgcgtcgtattatcaagcggaaaagtgtcaattgatatcagcgatcacttcaacaaaatggaaggcgataaggattggcttcatattgccagaatcgaacagctgtatccgttcccggcaaaagatacgaaggagcttttcgccaaactgccgaacctgcaagagatcgtttgggttcaggaagaaccgcagaacatgggggcatggagttatatcagcccgtatctgacggaaattgcgccaaaaggagtaaatgtccaatacatcggccgaagaagacgatccagtcccgcagaaggagatccgacagtccacaaaaaagaacaggaacgcattgtatctgatagcttgactcgcaaaaactaagggggaaatgtaaaaatggcggaaattaaggtacctgaattagcagaatcaatctcagaaggaacgatagcccaatggttaaagcagcccggtgattatgtagaacagggtgagtacttgcttgaactggagacggacaaagtaaatgttgaattgacagcagaagaatcgggtgttctaaaagaggtattgaaagattcgggtgataccgtccaagtaggagaaattatcggtaccattacagaaggcgctggcgaaagttctgcacccgccccttcagaaagtgctccagccaatgaacaaacgaaagaggaagcaaaagctgaacctgctgcacaagaagtcagccaggaagcacaatcagaagcgaaatccagaacggtagcgtctccggctgcacgcaagctggcaagggaaaaagggattgatctatcacaaattccgacgggggacccgctcggccgcgtgcgcaaacaagatgtggaagcttatgaaaaaccggcttcaaaacctgcggcacagccgaaacagcaggctcaaaaaacacagcaaagctttgacaaacctgtcgaagtgcaaaaaatgtcccgccgcagacagacgatcgcgaaacgattggttgaagtgcagcagacttctgcgatgctgactacatttaacgaagttgacatgacggccgttatgaatctaagaaaacgccgtaaagaccaattccttgagcaaaacgatgtaaaactcggtttcatgtcgttctttacaaaagccgtcgtggctgcattgaaaaaattcccgctccttaacgctgaaattcaaggcgatgagctgatcgtgaaaaaattctatgacatcggtatcgctgtcgcggctgaagaagggcttgtcgtcccagtcgtacgtgacgctgaccgcctgacgtttgccggcattgaaagagagatcggcgaacttgcgaagaaagcgcgaaacaataaattaacattaggtgagctgcaaggaggctccttcacgatcacaaacggaggtacattcggatcgcttatgtcaacaccgatcctaaacagccctcaggtcgggatcttaggtatgcacaaaattcagctgcgcccagtagcaattgatgcggagcgctctgaaaaccgtccgatgatgtacatcgctttatcatatgatcacagaattgtagatggtaaagaagcggtcgggttccttgtcaccattaaaaacctgcttgaagatccggaacagctgctgctggaaggataatttgaaacagacaaaaagtacactgcccttacaagcagtgtacttttttattgagcgaaggggagaatttatatgaaaagctgttatccgcttgagatcgaatttgaatataatgaagaattgcattctatcactccggttcttctgcaagacgaacatgacacgatattaatagactgcggatatcccggttttacaaaccatcttcaacatgctgctgcccggcatggaatgtcgcttcattcattgacaaaaatcattgtaacgcatcacgacatagaccatatcggctcactcgctgcattacatcgtttgcacccggatatcagcgtgacagtacatgagcgtgaagcgccgtatattgacggctctaaaaaatctttacggcttgagcaggctgaatcaacgtttagttcattgccagaggatgcaaagccttatgcaaaacagttcatttgctcgcttcaatcagtcgaatcggctccagttcaccggacagttactgacggtgagctgctgccttggtgcggaggcattcgcgttgtagccacgccgggtcatacacccggccatatcagtctttatctgcctgccgaaaaaacaatgatcacaggtgatgcggtcgtcattgaagacggaaagctgaaacttgctaatcctgactatacgttacatatggatgatgcggtccgatctgtgcagcggctgcttgattacgatatccgccaattgatttgttatcatggaggtttatttcagggggatgtaaaaaaagcgcttttgcgcctgtttcgtgatctgcagaataatcaaggataggagcggcggcagcctatccttgttcagttatgaaaacggaatctttgccgtttcttcttcggcgctgtttttctcttttttcttagaccagtaggtggcaagaacagaccccgacagattgtgccatatgctgaaaattgcgctcggcacggctgacaaaggggagaaatgcgctgtcgcaagcgctgcgcccagtccggagttttgcattccgacttctatcgcaatcgctttttgtgaagcataatccattctgaacagctttgcagtcaggaatcctaacaaatatccgattccgttatgtaagatgacgacagacacaatcagcagtccggattgaagcagatgctcacgatttacgctgacgacagaggatacaatcgctacgatgccgattaccgatacgagaggaagtgcgtgcacggcttgtccgacctgttttttgaagaacagcttcacaatcaccccgaggacgatcggcaaaagcacggcttgcataatggaaacaaacagtgaaccgaaagaaacgggaagccactctttcgcaaacagcataataagtgccggcgttacaataggagcaagcaatgttgagatcgtggtgaccgcaacagaaagcgccgtattgcctttcgccaaaaacgtcatgacatttgatgccgtaccgcccggacagcatccgaccagaatgacgcccgcggcgatttctgcggggaggcggagcccgactgataaacagaaagccgcaagcggcataatcgtaaactgggcagcgactccgatcacgacatgccaaggctttctgattaattctttaaaatcgtctgcttgaagagtaagccccatcccaaacataataataccaaggaaaatcgtcatataagaactgatccaagaaaacaaatcagggcaggcgaatcccaaaccggcaaagacgataacccacaagccaaaggtttggcccgcaaacccgcttatttttttcagccattccataaacacagctccttttacatccaatcaatcagtcagaaaatatgactgacttttctgtactccattataaataatattctgaataattcaatattaaatataagttttcgataaaattattatgtaaactaatatcttcttgactattcagacatatattcttacaattgatttttatactgaaatgaattgggagtgctgaagtgaaagaagctaatcaatggtcatctaagctgggatttattttagctacggccggctctgcaatcgggctcggcgcaatatggaagttcccttacgtagcgggaaccagcggaggcggcgcttttctgcttgtttttattttatttactgttttaatcggactgccgcttttgcttgctgaatttattatcggcagaaaaacacaaaaaaacgccgttgaatcctataaggcgctggcgccggggaaaaagtggcactggatcggatatctcggaatcataacgtgttttattctattatccttctacagcgtagtgggggatggatattaatctacattataaaaggctttacaggcggtttaacgctttcttcgggatttgatacgttatttatcgataccatttcaaacccttatgcagcggttttcggtcagctgctgtttatcgtgctgacgattttagttgtggcaaaaggggtgagcagcggcatcgaaaaggtaagccaggtgctgatgccggctctgtttattctgtttattcttttaatgatccgctccgttacgctgcatgatgcagcgaagggattaaaattcttcttcatgcctgattttggcgcgatggatgccaataccattttatatgcgatgggtcaatcatttttctcgttaagcgtcggagtgtccgtaatggttacatacagcgcatatttagaaaaagaagaaaatattgttcaatccgccgtatcggtgacggtattaaatgtccttgttgccgtgatggcgggagtggcgatttttccggcggtatttgcattcggtctcaagccggatcaaggtccgcagcttttatttaacgtgctgccgaccgtctttaaccaaatgccgttgggcatcgtgtttttactcgcctttttgctgctgtttttatttgcgacgctgacatcggctttttcaatgcttgaaattttagttgctgttttgtcaaaaggcgattcggcaaaacggaagcggtatgcatggatcgggggacttgctatatttattgtcggggtcccttcggcgctgtcgtacggcattttgagtgatgtttctatttttcaccgcagtatttttgacgctgcggattttctggtcagcaatgtcttaatgccgttgggcgcgcttttaattgccgtgttcgtaccgctgaaaattccgaaacagatgctgtttgacgaactgaaaagcggttccggtataaaacgaaaatggtttgcagtctggctcctattaatccgttatgtggctcctgtagccattattatcgtttttctgcacgtgcttggtattttttagaccaaaagaagcaggcccccgttcaagacgggggccttttttaataaagcggccacatcacgcggtgcgcttgctcgaaccgtttctccgcctcccgccaatcaacgacattccaccattgatccacgtaagccgcgcggtcgtttttatattgtaaataataggcgtgttcccatacatccagcggaagcaaaggaatgacgtcccattggctgtagagctgatgcttctcagcggccaaaatctccagccgcccggagcgcggcgcccagacaaggatagcccagccgactccttcgactttttttgctgcttgagaaaattgctctttaaaagcggaatagcttccgaatgacacatcaatcatttgaaagagcgcacccgtcggccgtctttttccgtttggattcatggaaaaccaaaaaatactgtgcaaataatggccggcaccgtgaaacgccaattgccgctcccaatgcgccactaagtcgtactgtttcgtttgtctcgcttttttgagctccagttctgctttattcagaccgtcaacatagctctgatggtgtttagtatggtggagtttcataatctctcttgaaatatacggttccagtgcggaataactgtatggcagtttagggaggacatgcttgccgatcggcacataggctctgcgctcatccggctcttccggttcggtaatgtcccggtaaagtgctgatgcctgttcgtaccattccgcctccgttaatccatcatcctgaagggtgtgaaaaatccggtcgatttgtgccgcgaagcgatcgaaccgaccttgctgtatgacttgttccttcaaggtttcacaccaattcagcatttcggtttgataagcgtgccgtttcatttttcttcctccttttcactcactttcataaaagtgctgagcgcaagcaaagaaaacacatacgggtagctgtgatacctgatgtaaaactgtttcggcaggccgattccggtcggatagctgaaagcgtctccttcgtaatgccggttttcaataagaaaagatatgccttttgtgacggcttgatgatgaggtttttcgtattgcagcaaagcttcggccgcccaagccgtctgtacaagcgtcccgtaagaaagcggaacataggttttgacttctgcgcttttacaggattctccccagcttccgtcctcgttttgaatggacttcagccagcggatcgcttttttcacggccgggtggttttggctcacgccgcaagccttcatccctgtcagcgctgcccatgtgccgtaaatatagcagacaccccatctgccgtaccacgatccgtcctcttcttgatggcggatcagccattggacggccttttcaatctgagggtgatcaggagaaagccccgcttctcctaaacagtgcagcacccgtccggttaagtcgcttgttgaaggatcgatggcagcttcctcagccgattccagcggcagcaggcggaccagcggatgattgacatttttctcaaaagcagagaagccgccgtcactgttttgcatggacaaaagccagctcagtccgcgttcccatgaggcgggataacgttttcgcgggatggctttgagcactgcggctgtgtcatcacaatcaggattatttgtattaatgtttgaaaaaccccatcctcccggttcagcatgcgggttgtgaacggcccaatcagcgactttcgtctgctgccgttcacgcagaaaccgggcggctccggttatcatttgatcgttatctgagatgccgcttttcataagcgcatagctgagaagcgccgtatcccaaacggtcgacgttgaattttccaggtacggtatatcgctgcaagacgtgagcaaagctttcgtgccggcaagcgcttttctgataacgggggagtggcgcgatacaccgagagcgagcaggccgtacaccataaaaatagtggcactcgcatagctgtataatgtgccgtcttcttcaatccggtcaagcatatacgttttggccgtacgcagaccgagctggtgaaaagcggcaggaatctgcaaaagccgcttccagtgcgcgaaaagagaagagaggtctctgttctcatcatgatcggaacgaagccatgtaaacggatttttagtcatatgccgatctaaatgcgcgagagacggaacattgggatttttcagcgaaaatcttttgttaagcgtcacggccatcggtacgaaatgaatacgagcgtatgtactgaactggtaaaaatgcagcgggaaggatgggggaatgactaagaaagataatggcagatgcagcgcgggccatgggtaaaggccgtttgccgcaagcatccactttgtcatgaagtgtacgttgcgcaagccgccatttgagatgataaagcgttcagcctgaatcatatgcgcctcagaacggctatataaaccggaagccagcaagccggcatagccctgtacagtagcggtcacatttcctttccggtcatcaggatagttggcaaaagttccgtccgggcgctgtttagcgcgaatgccttctgcaagctcagcgatcagttctttatcattgtctccaagagaagtgagaaggaggatcagaaaggcgtttgtcaaaatcggaccttcaaaacaaaatgaccatgagccgtccgcattttgcgtttctcttaatagggagatggttttcttttggcggcttctgacgttttcatgaattgtgctcacactcgctcaactccttcagaagcatatatattcatatgtaaaaggcggcatgacaaaagaaagaaactgctgacaggcagcagtttcttgtttgatttaatcttccaggttgatccagacgcttttcacttctgtataattattcagcgcgtaagagcccatttcccgcccgaggccggattgcttatagccgccgaaaggagatgccgcatcgaaaacattgtagcagttgacccaaacggtgccggcttggagacggtcagcaatgtaatgagcgtttttcacattttcagtccaaagtccggctgcaagaccgtattccgagcggttcgcccgctcaatgacttcatcaaccgtatcatacggaatggcggctaagaccgggccgaaaatttcttcttttgcgatggtcatgctgtcatccacatccgcaaatacagtcggggagacaaaatacccttcttcaaacgggcagctgccgcccgcgacagctttggctccttccgcttttcctttttcaatatatgaaagcacgcgctcatgctgttcctggctgacgagcgggccgatttgtgtatcttggtgaaggccggcgccttgctgaagcgatttcgcatatgaaaccatttcgctgacgacctcatcatatttgtctttgtgaatgaagacacgggagcctgcgcagcatacctgtccctgattaaacatgaccccgtttaaagcgccgggaatggctttcttcaaattggcatcaggcaaaatgatgttaggtgactttccgccaagctccagtgtcacgcgtttaattttttttgcggctttttccatgatttttttgccgatttctgtagaaccggtaaaagcgagtttatcgacatcgtcatggttggtcagcgcttccccggccgtctcgccgaaccctgggacaatattgatgacgccgtcagggaagcccgcctgatctattaattccgctaaatagagggcggtcagcggtgtctgctccgccggtttcaaaacgattgtgcagcctgtggcaagggcggcgcccattttccacatcgccataaggagcggaaagttccaagggatgatctgccccacgacgccgacaggctcatggcgggtgtaattaaaatatgagccggcgaccggaatcgtttgtccggttatctttgtagaccacccggcataataacgcatatgctcaattgcgagcgggatatccccattcgtcgtttcattaatcggttttccgttatcaagtgtttcaagctgcgcgagttccgttttgtgctcttccattaaatcggcaagcttatacatcagcctgcttctggaagcggccggcatagtgcgccattcgccgtgatcaaaggctttgcgtgccgctttcactgcactgtcaatgtcttctgtctgtgcctcgtaaagcgtcatcagcgtttctccggttgccggattcggtgtgacaaatgttgatcctgaagcgctcggaacaaattttccgtcaatataaagtttcttcgtaccctgtaaaaatgtttccagcctttttgtgatctgcatcgttaaagaactcattcgtaacaaacctcccgaaattttttatggtctgttttgagcatcttgatgtccgcgcaaagtaagcgcatacagtcattctataataacacccccggtaaaatcaatcgataaccgttattgcaattcacaagaaaaaacggctacaataagcttatcgattaagaaaaggagttttataaatgattcataataattggcagacaaaagaaagcgtcaaaaaggtcaaatgcgtacatacagatgcgaaaaaatacattgtcaaaaatgtgctgacgccgggtaaagagtatgaagtcaaaaatgaaacagaagaattcatttttgttgcagacaatacaaacaaagtcggaggcttctacaaagagtattttgaagaagtttaaggctgaatgaattcattttgcctgagccatactaaaaaagactacatataaagggtggctgcaaaatgaaaaaaacagagcaagacaaacaaaataaaacatcagatcagcttcagcaagtgcaacctgaagaaggcaccgacacgacgatggaacaaatttcagatacctataaagaaggaacaattgaagatacggatcgttgatgttttgttgaaaccgcggcattggagaagccgcggttttttatggcgaaaataaaaaactgacttttcgaaaaaaataccgttttcttgaaaccttttcttccgctgaaccgtattacttcataactgcggcacctttcgcgaagggcttttttgatgaacgttctaaaaatgtaatctgttcgtaatggtttaaatgccgtctatgtcgtattcttatatagggataaagaacttattttttatgattgtaataaaacaatagtatagaagcagaaagtggggttcttcattgggaattttttctgtcagcagatcaaccgacacaaaaaagctggaggctttgctcgttgagggagaacggatcgaaacgatttataaactgcgggttgaccaaatatgctttacgaataaacgagtgattttctttgataataaaatgttctccaaaaagaaagtgcgcgtatttcttccatataaaacaattgaaagcttcgccattcaagaagcggggatgtttgatcccgataccgggcttgtattaatgacaaggggaaaaactttcgaattggaatttgcaaaagaaacggacttgactgaggttcaagccatcttaacaaaatacttatgcagttaaatatcacataaaagccatccgaatgcatgcggatggcctttttattatataatgcttgtttttccggagttcgaatcaatgagatccgggtcagcgatagaactgatggggatataaatcggcgccaaatcaccattttcttcaccgaatccgtagttgatcttattggataaaaaataatcgatttgctgatacgggccgatcgtaatggaagaaccgcggtcgaccgcatttactttaaagcctcctacatttaccaaaaccggcgaaaacatcataatgggcctccttttccggcagggattttgtcgcatgcagactcaaaggttgatggagaatcaatttgatcccggtcatccactttgccgttcgtgccgatgaagccgcttgcatctccgaagttctgtccgtatccctgattctttttatcagaattctgccattccgccagtaaattttgtccgacattcaccgctgaagcattttcaaaggaattaattttcaacatgaaaatattaatattgatatatggagttggttgaaccacaggcaaacctcctttaatacaggtgtatgccggctgttatgaccgtatgcttagacagggggcgataaaaatggatttcgataagatgaagcaatggatggaaatggcgcaaaacatgtccggcggcgacttttggaaaaacgtttttgatgatgaacaactgaaatcatttcaaaacggccattctcattttccctttcaacagggagatgggcaaatgagaagaaatgaggatgcttttcctcttatagatattgtggaaacccatgatgagctccaatttttgctgtatctgcccggctaccggaaacaagatgttcagctgttgtcctacggagaatatattgtcgtaaaaggcacgagaaaatcctttttcaatgaacaggattttaaacagaagaccggaaaatacggcgattttgaaaaaaaactcgatcttccgcattccgctcaaggtacgaagggaatgcaggcggtattcaaagacgggattttatatatatcgattgctaaacatctgggggatgcaagccagatcattatcgaaggctgatcttgttcgctgtgccatctatcagatctgaatcatcgatactcatgatagggatggcgacaacggtgcaatcaccgttttgttcaccgtacccttcatttcttttattggctgctgtgtttctcaccataacggaagagccggtgttaaaagccgctccgccgctgattccgttcatttttatatactcaaagttgataacggatggaaaaaacatcatgattcgcctcctttttgtatatcatgtttatatattcgcaatacgggacgcatagaactttccaagagtgacggggaaagaagtgattttctttgaaaaaaataatgaaagagattttcaaaaaagtgtgtgaagaagaattagaccggcttaagaaagtggaacaacagcttgatgagcttcaggataagtgtcattttgagccgcaaacggttgaaggggaaaaaacatatgtccatattgagcacgtcaaagtggacaagattgaatacaatattgattttgaacagctgagtatagaagagctgagcggtatgctgaatatcggcgccacttaccatacaccggcgcacaggctcaaacaagcctgcgctgaagaaagtcgggacaacccgcaaaatgatgctgcgaaagaaaaaagacagacaaagcagcagacacccaatgtcaccatcagggggagaaagcattgaccccattgtttcatcctcctttttcgagggtatgtattaacagatgcagcgaagaatacagacgaaaaaggagatgatgaatatggcattatcaaaagaacagcaggacagcctttatcataaattaatcgatttaaaggaaagtcttcagggagaatccaaagaaaatcattcaatgagcgaagacacaggagaactgtcgaacggagtagataatcacttagctgatcacggaagcatttatttggacagggtcacgaatcagacgctggacggtgtcgatcagaatcttttagatgaggtgaacgccgcgcttgaacgaatggataaaggaacatacgggatttgcgagaaaacgggaaaagaaattccttatgaaagacttgaagccgtaccgtacgccagaatgaccgtcgaagcgcagcgagaaacagaaggggatgtgaaaacagacgctccgtcatatgaaagggaatttcacgagcaggtgaaagacctctcaaataaagaaaccgttgatcaaaaaagctcacaaacttacgaaatcctggatcgcgagcaggattcacaataatagcagcaggtacattcatatgtacctgtttttttattccataaaaaatctcagaatcgaaataaaatcattgactttatataaaaagaaagtaacatactatttgtaagtaaatattaaaagattaccgggaggaatttagaatgtctcaagtattatttgtaaaatcaagcgaccgtacggctgaagaaggcgtatccgtaaaattatacgaagcgtttctggctgcttataaagaaaacaatccgaatgatgaagtgatcgaacttgatcttcataaagaaaaccttccttacctcggaagagatatgattaacggaacattcaaagcttctaaaggaattgaaatgacagacgaagagaaaaaacaagcgtcaactgctgacatttacttaaatcaatttgttaaagctgacaaagtcgtgtttgcattcccgctttggaacttcacagtgcctgctgtgcttcatacttatgttgattacctgtctcgcgcaggggttactttcacatacacgcctgaaggccctaaaggtctgatgggagataaaaaagtagcgctcttaaacgcacgcggcggcgtatattctgaaggaccgatggcatctcttgaaatgtcattaaacttcatgaaaaccgttcttggtttctggggtgtccaagatcttcacactgttgtcgttgaaggtcataatgctgcaccggataacgctcaagcgatcattgaaaaaggactgcaagaagcgaaagatctggctgcaaaattctaattgccataactcttgcgcccctacagggtgtgagagttttttctattatagaagaaactggcggcagctttcgattcaatcttatattgatatattgatattttgtcgaaaaaacaatttttatgtagaataaagcatttttcacaaagaaaaaaggttttctgtaaaagaattaaccctcttgccaaaatacgactgatggtgtaggatataagagaagctacattgttcgtattgttaattaagttttaacctttaagctgtaatagggagttttatatcgaagccggaatgtcatgcctccattgcagaggacgacaggaacgcttctgcaaacacccactttgaggagtggtggtttaaaactttcttacttgcgtacggcatacgtagcgaaagccatttcccttgcggagatggctttttattttgaattgcccttgagcagcgtactttatcagtatgataaaatgaaagaatcaaagacaaagtgaggttttacaacatatgctggataaagcccaatcccttctggcgcattattttggctacgacagtcttcgcgcgggccaaaagcaggcgatacaatcagttgcagaggagagaaaaaacacggtctgcattatgccgacggggggcggaaaatcaatctgctatcagattcccgcactgctgtttgaaggaaccacaatcgttatttcccctcttatttccttaatgaaagatcaagtcgacgcgcttgaagaagcgggtatcgcggcagcttatattaacagcacccagacaagccgtgacattcatgagcgcctgaccggtttgaaacaaggggcttaccggctcttttacatcacaccggagcgtttgacttcttctgaattcattcacatcctgcagaatattacggttcctcttgtcgcaattgacgaagctcactgtatatcgcaatggggacatgatttcaggccgagttaccggaatatcgaaatcctttttaatgaattaaaagaaccgcccgtcatcatcgccttaacggcgacggctacgcctgaggttcatgatgacatctgcaagcagcttcatattaagaaagaacaaactgtatataccggttttgccagagagaatttaacgtttaaagtagtaaagggcgaaaacaaagaccggtttatcgagcggtacctcgaaaaaaataaacacgaagccggcattatatatacagcgacaagaaaagaaaccgaccgtttatatgagaaattaaaacgcagcggcatcaatgccggccgttatcacggcggattggcggatgatgacagaaaagaccagcaggagcgttttcttaacgatcagatacaagtgatggtagctacgtccgctttcggaatgggaatcgataagagcaacatcaggtttgttttacacgcgcagattccgaaagatatggagagctattaccaggaagccggacgggccgggcgcgacggtcttaacagcgagtgtgtgctcttattttcgccgcaggatattatggtgcagcgttttttaatagaccaatcggccgccggagaagaaaaacaaaagcaggatctcaaaaaactgagacagatggtggattactgtcatacggaagattgcctgcagcggtttattctgaagtatttcggcgagaatgaggcggaagcttgcgaagcgtgcggcaattgcactgatacaaggaccgcccatgacgttacaaaagaagcgcagatggtattgtcatgcatcatcagaatgaatgagcgcttcggaaaaacgatggtggcgcaggtgcttagcgggtctaaaaataaaaaagtgctggaaaacggcttcagcagcctgtccacttacggcattatgaagcatcaatccgcagcggaaatcagtgattttatcgaatttcttatttcagatgaatatatcagaatggcggacggcacatttcccacgcttatggtcacccaaaaaggcagggacgttctgcttggaaaaagcgcagtcgcgagaaaagaagccttacaggccgccgccgtcaccgaaaatgatgaattatttgagcttctccggcgtctccgcaaagagattgcagctgaacagggtgtgcctccatttgtcgtgttctcagatcagacgttaaaagaaatgtcggcgaaacttccgaaaacagatcaggatcttctttccgtaaaaggggtcggggaacaaaaaagattgaaatacggagcggtttttttagaagaaatccgaaattatgtaagagaaacagagtgaaaaaaagtttttttagaaatttgcacattgtgtttttcatgggcgccggaaaaatcagaagcttgaaaacccttgctgtatcaaggtttcagcaagacttaccaagcgagagaaatgtttcatgtaaaggaactgtaatctaattcaaatcgttttgttattgaactgacattttcatatgttacgatatcacctgttagccgccaataaaaagctaacaagggaggatttacttatgaagaagacgattatgtcctttgtcgcagttgcagcaatttcaacaactgcatttggagctcacgcttctgctaaagaaatcacggtgcaaaagggtgacacgctctgggggatctcgcaaaaaaacggagtgaacctaaaggacttaaaagaatggaatcagttatcttctgatttaatcattgaaggagagaaactgactatttcttcagtagaaacaaccacatctgggcagtacacagtgaagcagggcgacagcctctggaaaattgctcagaaattcggaacatcagtcggcaatctgaaaagcttgaataacttgcaatcagatataatttacgcaggcacaacgttaaatgtgaaaggtcaggctcaggctcaggctgcacagccggctcaagaagccagccagccgcaaactgaacaaaaaccagctgctgagacagaacagccgaaacaagaagctgtcaaaaacgagcagcctaaacaagaacctgttcaagaacaacaacaacctaaacaagaagcgaaggctgtcgaagcaaaacagcagcctgttcaatcaaatacaaaccaacaagagcctaaaaagcagatgacaatgactgcaactgcttactctgctaacgacggcggcatttccggtgtaacggcaaccggtgttgacttaaacaaaaaccctgatgcaaaagtcatcgcggtagaccctagtgtcattccgcttggctctaaggtttatgttgaaggttacggagtggcaacagcagcagatacaggcggcgcaattaaaggaaataaaattgacgtatttgttgcaaagaaaagtgacgctaacaactggggcgtcagaacagtaaatgttaaagtattagactagtttcatatagagatgaagaacacaaggcgaaatgctttgtgttctttttttcttcccttttttgactgtatataatcgttatatgcggaaaaagaaaaagcgtttctctaatataataaggaatggatgtgaaaaaagaatcggaagggatgaatctgatggagccggaatgtatatgtttatggaataccttcacagaatcaccggtgtttcaagcaggtatatgcaccgctttcgccattgtgctcgttatcggactgtctatgcctgctgtcaggctgtttcaggcgcttgacagagggagaggaaggccagccgttattgaaaaggtgagacgtactggcgtgatgaagaatggcaggcacgagcttgtacttattttaaacgtaaaaaaccaagacggaacgcatgataaacgtgaactgacacacgccgtatataatgaagagatcagccgtttttatgaaggagcttccgtatgggtgagggcagcggctggcggacgaattatgatcgctcctcgcacgccgcggcataaggcgtcaaaataaaaagacggggcggttttcccgtctttatgtattaatgccgatcgatccatatccgtccgccttctgagccggcttctatcctgcatgctcctccgatcgggaatgtcatcaaaggggaggtatggccgaaatcagcatttgcgataacaggcatggatgacagttcttcttttgtacggatgacggcacgcagagcctcctcagacacatttgaagcatgctggaaacgtccgatgacaattcccttcacggctgaaaaagcgggaagatggatgagtgactgcaaatcccggtcaaacatatgaatgtccgacatatgatcatcttctataaacagaatcacttgttccatctccggaaagtattcggtgccctgcagaagattcagcgtgcatagatttcctccgatcagtgttccttccgcatatccgggctgaataacgagcggtcccggattccgataaaaacgtctgtcctcctggttcaaataccatttatcatcactccactcggatgaaggttttacctcatacgggttgtcagaagcacagcaggccaagaaagagtcaatcgtatagtccagcccttttttcatggcaaatgaagaaaaatggggaccggaatatgtaataaggccggttttttgatatatggcatggccgagagcggtaatatctgaatagccgcaaaggattttcggatgccgcttgatgttttcataatcaacgtagcggagcagctgatttgattggaacccgccgagtgtcgtcaaaatcgctttgatgtcaggatcagcgaaagcttcgtgcagatcccgtacacgcgattcaatcgatgatgaatgaaattcatttatttctttcgcattctctgaaaaagagacacaaaagcccagctcctccaattttgtcttcgcggcatttatattttcatctgacatagcggacatgcttgtggccggagacacaatacggatgccgtcgccttttttcaatttttccggatacaaaaaaaaccctccttaaatggtttaatctattacaccatattaacgagggtttatctatcattttttacaggtcgacccatttaatgccgcctgattgcgtatcattgtcaatccagacatcaaattgatgcttttcataaaaatgaacgagccggtcgacatgatcccaatcacgcttagcgatgtcgcccgtcactttcgggatattctgctctctggcgatatgttttaaaaatttcatgcagatcgagccgtagccgtggttcggcgggcctttaatatccccgatatgaatggcattgtcataataagaagcgatcagtgaaaaacagcctcttccccggtaggctgattcacaatcagtcagcataatcttacatgtttggccatcatcaatcgaggaaacaatgatccaatcgtcattgttcgattgatcaataccaagcactcgcgcgtcttttgatacatctatcagattttcccgcattctgaaaatctgaaattcaagtttatgaagctctttttccagctctttctgatctctttcttctgcagtaaacaaaatcatactcctttcacagcgtaaaagtcttagtcaaacacaagtatccattgtagtaaatgatgtcttggtttgtaaatgggttttgcaaaaacttttttagaaaagtctgccgtttatatgtggattgacgtttttaaggcggtggggatagggaaaggaacagtgagcagcggaaaaaggaggaatctataatggcaattgactcactcatcggcaaattgaagtacgtaatgacggaatctcctgataaaatgctttccttatatgtaaatacggatatgagaaatccggatcagcaggggggagagtggaaaatcgccttgaaaaccggttttcggagattaaaagagtatctgtctgtaagtgatccggaagaagaaaaatctctcgtccgcatcatgcaacgtgtctatcaatatatcgatgggcttggtaaagagatgccgcgaagcctcgtattttttgcatcgggggaaggcggtgtctgggagacgattgaattgcaggtgcctgtcgaaacacgattttattgggaagaaacggctgtccttgatcaattagaacttctccgtgaacaatttccaagcacggcttttattctcacccagcagaatgaagtgaagatcatagaaaccgtactcggaaaaattgaaggggtggagcattatcaatacgacgtcatcaatgaatcgtggaaaccgcaggatgtaagcggaagctccgcatcaatggacgaagacgccgccaaagcccatgtcgaagaaaaccaaaacaggctgtataaacgattggcttcaaaccttgatcaaaaggccgcttcacaccaatgggagcgtctcgtaatcgcaggggacaaagaaacagccgatattctcgatcagcatatgaataaaccgatagatcggatcattccaaaaaatctgttgaatgaaaacgaacataaagtgatagaagaactgttgaaggaagcataatatgacgaaaggccgggtctcaaacacccggtctttttagggcttaagtttgtctaatttctgacgaagcggacgaaaccgttgacatcaaagctgaattctcataccatttggatagtcagtaaaattgagagaggtcataagatgaatcagacagaaaacaaacctaaaagttataccggtatcgtgctgacattgaccgttttgatcaacgggttaattgcggtgctgttttttatgccgaaatcgggacaggtcagcattgccaatattcatattctgccgatgttaaatgctatttttaacagctttacttttatctttttgctggcagcgctctttatgattaagcaaaaaaatattcaagcgcataaacgctttattttggcggcgtttacgacgactctgctgtttttgatctgctatgtcgtgtaccactcgatagctgagaatactttattcggcggccacggcatcattcgggggatttatttctttattttgattacgcacatctgtctttccgccgttatcgtgccgcttgcgctgtttacgctgatcagaggattcagcatgcaggtggagcgccacaaaaaaatcgcgagatggacgatgccgctctggctgtatgtcagtctgacgggtgtcattgtatacttaatgatctcaccgtattattaaaaaaagccgtgctctgcgcggcttttttctattgatggaaaaaggcgcctcatcagggcgccttttactcttcaagcgtttcaagtgttgttacatttaaggattgttcaacggtttttgtttttgcttttactttttctgcgtacgtgtaatcaccatagcagtagggataacggaaattgtctttgttccctccgcaagtgtaaagtttcggattctttttgacctgctgctcggagtattgttttgccagttcctcagtatgcgatcctccatgttcagccacaaaatcaatatagccggctcccatgttgtagctttgtataatcgtatccaagtctacgccttttttcttgcctgtttggtacatgagagtgaattgtttgattccctgtttgatactggtttgagggtttttaatctcatttcgctttaaacccagagattctgaagactgcatgggatcatttcctcttccttttgactcctgatatatcatgccgagtacaagcgatgtatatttggtgagtcctttttcatccagctcgtcttcaacaagcggtttgtaatctgtcagccgttcaagcacgatcggtttgacatcaaacggaagacttttgagccattcattatttgaaaataacagaatgaggaagaaggaaaccatgacaaaaacacatatcatcataagacccgcggcagcgaaacagccttttttctttttctccactgtgtttcaccctcaatttcaggagcattatgactttttcattatgacacagatggatgcgcgaaaccaagcggaaacccgtatttgaaacataaatttaaaataacggttcttttgtcaggcgcaggatgtatctgcatcaattgacatttggtataattgggctacttgagaaaagaagggtgaggtatatgactgaatttcacgaatccggaaagacgaatgaccccgctgtcgatttagatgaggaaactttatttttggttgcccagacttttaaggcgctgtctgatccgaccagaatcagaattctccatttgctgtcacagggtgaacacgcggtaaatgatatcgcagaaaagctgaatttgctgcagtctaccgtttctcatcagctgcgttttcttaaaaatctacgcctcgtcaaatcacgcagagaaggaacatccatctattattctcctgaggatgaacatgtgttagatgtgcttcagcaaatgattcaccatacgcggcacgattaaaaaacatccctgctttttagacagggatgtcagccgtactgactgttattggtttggtctctgctcgtttttaaaacataaaaagagaagccgctgtaataaactgcgatgaaataaaagatactgatggtcagcggatcggccccgaccgtttggctgtatgcctccggatgggtaaagtccgctgtgacccggtaaatttcaataacgcgataaacaaatctcgataggaaaaacgttaatagaataagttcaatccacagatgagtgcgaaaatacatttttccgcggcgttcttcaaaagaaatattccgtttggcaaacaggaccagaagccagccgcaaaaagtgccgaatataagatggccgtataaagccgggtgtgtgatgctgaaaaacgccagagctgcggccagcaatgaaaacaaaatcattcttgtataaagccagcggggtttcaaaggctgaaagccgacggaccgtttcacctttttatacagaaaaaaggcaatcattaagacagggcagatgctttgaagtgtgatatgcatggtgtgaaactccccctccgttgagtagtgtatgcttatccggctggttttagtagtctgatttattcgcaggctgaaagcatcttttatcacagtatgcgcgtttcttttttttgcataagagaagcgcccgcgcctttttcaggatttaaacagaaaactcttgataaactaacggtattagttataataaaactaacgatattagttttagggggatgttgatgagaatcttacaatacggaagggtttggcagctgactttttttccagcgcttttcccggtgaattgttatttggtcgaagaagaagtaggagtaaccctgattgacgccggactgcctaacagtcataaaggaatcaaacaagcattgcggcagcttgggaagccgctgaatgacatattactcacccacgcgcacggggatcacatcggttcgcttgactcattagctgcggaatttccggatgcctccgtctgtatttctgagcgggattctttcttgctgaaaggtgacacttcattatttgagcatgaagcacaaacgccgataaaggggggagtgccgaaaaatgttcagaccgaacctgatcgcctgctgaaaggcggcgagcggatcggatctttacttgtcattcccgctcccggtcatacgccgggaagcctcgcttttaaagatatgagaaatgatatgctgatcgtcggagatgcctttcaagtacggggcggccttgctgtttcagggaagctgaaatggaaatttccgtttccggcttttgctacgtggaataaagaagaagctgtaaaaacagcaagaacgcttatcgctcatcaaccaagcagtctggccgccggacatggaaatgttctctgcaatcccgttgaaatgatggctgaggctgctgaggaagctgaacgaagcctgccgggaggccgatcataatgtcaccgagagtcggaatgagccttgacatgatattgagagccgcagcaggcatcgctgacaaaaaagggctgaacgaagtgacgcttgcggccgttgcaaagtccttaaacgtaaaaccgccttccctttacaattttgtcaatggccttcaaggaattaaaacagagctggctgtctccggtttaactatgttatttgaaaaaatggcggcctctgcagaaggactgacgggtgaaacggctttgctcgctcttgccgatgcctatatcaatttcgccgaagccaatcccggattatatgacgcaacatttcaaaagataaaagacggccggattgagaatctgtcaagcctgcttgtagagcttgttgtcaggcagctgacagctaacggttatgcacagtctgacactgcgattcatgctgcgagaggactgaggagccttcttcacggctttgccgtgttgagaaaacagagtgcatttgaattaaccgaatcaattaaggaaagccggaagtttgcagttgttgctttcctaagaggtttacagggtaggtaacaataatattattatgtaaactaaataaaaaaacgcatcagtaaaaggagggacaaatggattcattacaacatatcatttgtgagcggcgcacctattcacatatttttgattctcatgcacacacatactgccaaatgctctttccgctcgaaggacagctggacttggagacagaaagacgtgaaatcagattaaaacctgatcaaatgctgtatattccgcccgggcatgaacatcggttccgttctttggagcgaaacgaatgtctcgttctcgacataccggcatattttttcaaaggttcatttgatcccggcgttctgaataagcttgattctttttggacatcgattcggtttctgctgacagaagagactaagcagcagtcggctcattcattgagtctgcttgcagaatatattgctgaaaagatacaagaaaaccgtacgaatgattcaattgcgtatatccgccgaaatctctcaaagactttttcaattaaagagcttgccgcaatggaacattaccacccggcgtattattccgactggtttaaaaagcagacagggaaaagcccgcaagcttatattgctgagctccgtatgaagaaagcggaacaaatgcttattgaaacaaaatgccggctgacagacatcagtcaggaggtcggctttcaaaatttgtcttcctttaccagatggtttgtcagacataagggaataacgccgcgcgtcttccgaaacacctttcaatctgataaataatcctgaaaatcagttaaataaactgcgtctttttttggtatcatgattgtaaaaaaggagtttttgatatggcagtcatcgaagattttatcaagctcgatctcagaataggaacggtcgtaaaagcggaagtattcccggaagcaaaggtgccggccattaagatgacaatagatttcggcgaagagatcggcatgaaacaatcaagcgcccagattacaaaacggtacgaaccgggtgatctgacaggcaggcaggttaccgctattgtcaactttccgccgcggcggatcgccggatttaagtcagaagttctcgttcttggcggcatcccggaaaaaggagatgttgtcctgcttacgccagagcagtcagtaccgaacggaacgaaaatcggataataaaaaaagacgtttgcagaagcaaacgtcttttgcgtattgaggcgatacaccacacgccacattcgtgtgtgccgcaagggcatgtgcatcggcttacacaattcagctcatcgctatatgaatatagcatggccggtgtggaaatgcaagagattttttaatatatgttatatctggctttgttttgccgatccccgattccttcgtgtaaggttcgtttgaaattttatgatcttgaataaagcagttcgacaaatgcaagagggaatttgagcaagttgtgaccgaagtgtgacctggaattaaaatccgggtctttttgtgtaaaagatgcatgcgaagagaccatataggcattaaatgttattactgatgtcttcatttatcttttggctaagtttctgaaccttctctttaacatttgaaacagctcttttttgaatttcatcaaagttctcctgaatatagtccatgacacttcttattataacttcactttcaaaattgaatatctcatttatttctgactgttcttcatctgttaggtgatggtattgaagttgtttagcatttacttcagcagctgcatcaatcctaacttagttgttctggctgtacaatttcatattcaccttctgcatacttttgctccgcataatggtctccccattgacagagctcctgcaagataggtttaagagattctccaagttcagtggatgaatattcaaccttcggcggtacttggttatacatctttctgctcacaagtccactggcttcaagctctctaagtgtttgaatcagcattttctgagttatatttgggataatgcgctttaattcactcgttctcttcggtccattcattaaaaagtataatacaaggcctttccattttccgccaatcacttcctttgtcacttcaaacccacagctaaattttttcatgtctaaagctctccattccacatttattactttttagttactatatcacaaaaaagtgggtacttccgataatgtgcttactgaaggatactattacttgtaagttgttcttcaagtacttaaaggtactagacataaaataatattaattctaaaggagtgttaagtatgggtgaatttgaaggtaaagtagcgcttgtaacgggtggaacaagtgggattggtcttgctgcagcacaaaaatttgtaaacgaaggtgcatatgtttatatcacgggacgtagacaaaacgaacttgataaagctgttaaccaaattggcaagaacgtaaccggtgttcaaggtgatatttctaagcttgaagacttagacaaactatatgacatgataaagcaggaaaaaggtaagttggacatcctttttgctaatgcaggcatcggcagctttcttccattaggtgaaattactgaagagcaggttgatagaacgttcggcattaacgtgaaaggaaccatttttactgttcaaaaagcgttatcactattcccggacaaagtaggttctattattgtaacgggctccaccgctggatcaattggcaacccagcatttagtgtatatggagcatctaaagcagcattaagagcactggttcgcaactggattcttgacctaaaaggtactgaaatccgtgtaaatgtggtaagtccaggagtgattcttacacctgcatacgatgagctttttggtgatgcacttgaaggagcgatggaaaatgccagaaatactgttccagctggaaaagttgggacacctgaagaagtagctaacgctgtatctttccttgcttcagacgaaagcagttacttgacgggtattgaattgttcgtagatggcgggctagcacaggtataatttcactgcgcagaggttacaaatcttccccaaaaaaggttaatggggatttacttgaagaagccgtataaaaaagtcgttttccttaaaggacagggaattcgacttttttatgtttgaatttgattaacgttgtaaattcgcattttcctggggctgccactaaatgacctgtaaaaaagattactttgtgaataaatgtacttaaagtaacggaaaggagaatgtccagttgttatttggagtgaattcggtggctataaagaacttaattctgcccattttataaagttcttttatgaaagacttcatgaaatgaaagaaaatcgggaagaagatgaagactaagacgattaataaaagaaagctctcttttagagagcttttttcagattttcaatttttaacaggctttataatgagcaaacaggcattactcaaaatactcgccgcgcctatccaaagcagccattgtgttgcggtcagccatgaggcagttaggataaagagtccaatggcaattgatatataattgccggctcggtccagtttacgattgcaatgaagtttatatttagcatgagaaataaattgatcaattttatctttcagctcatagcatttttccttcatcttatcctcagtttcttttacttttcgataaagcatattattcatcgtttgcactcccatatcgccgttttgaaaattcagccatgattttttcttcatagtcatctgagatggattgtgcctggtcttcaactttcaaatgtgctttttcttcaaaaccgtcctgttcttcaccatcaaaacgataaagtttttgcaatagcctccagaatgtttcaacttcttcagttgtgaactcatgaaacatatccgctaaaaaataggtggatctttctgaacaggaaattaacgctttttttccttcaggggtaatctcaatattgattgcacgtttatccagtttgcttggcacagtgtgaacatatccttttttcgagagacttgaaattaatttgttagcggtttgttttgttgtgcccagctttttagcgatattcataagtgtggtatcttccgtcggtaaatgggcaatagcaataagagtcatgtgctgtcgggaagtcaacatttctaagtattcgtccccccgagtctgcaccttattgacaaccgaaaataatgatgcgtaactttgttgcataaaatgcagttccttcattagtaatttaatatccataagttatctcccatctaaattgtcaccatgttgacaattacaatatacatcacgaagggaaataagtcaacatggtgactaatagggcgggtacggctgttttcaaaaatgccacagacagtcggagtgtttacaaaaggggaaataagtataataaatgcgaaaagggcattaatccaaagtgggaaggtgtttgacattcagaaagtgaactggtcagaacggtatgaatggttcaataaacaagatgaaaaagatgggcgtttaatggcgttccttcgtcatgagcttacatatgaggaagtcatacggttatataagaaagggttttatttgaaatcaaaagaaggggatgtttcgttacgtaagaacgatatctgtcgtatgtttggggttgaagagaggcagtggggcaaatcttaatgaacgggaagagaaaaactcttcccgcttttcatagcagctgttattctttttccagcatggaagtcagccattctcttaatgccggtttctgcacataccgctttccgtttctcgtgatatgcggaatgtcagatattcatgaggatcaggtgagttaaagttttcaatccgtctccgatgaaatatccggctaaagcgattccaatgccggtaatatatccaaacctccaataaacgttatcattttttatacggtgaagccggccggaggattcagccttcagcaaaaccgccgggcgtttattgcggacggttttgattgctgagcttttccacctgcacctttccggagaagaaaacagcacctccgcccatatccgccagccgatcgggcgtgagtgaattgacgagctgttttttatcatccatatcggcccaaagaccttggctcaccgcaacgccgggaagcacctgttcgccgaccgaaacagtcaattcgcactctccgcggtgattccaaactctaacggtttctccgtcttctatgttccggtgtacagcctcttctgtatgaataaaaagttttggcgctttttccagttttacgtgtttttcgttatttgaaaatgtcgaatttaaaaaattatgattcggtcccgggacaaataaaagcggaaaatcgtcatcgctctcaagagggatgtgtgtcggcagcgccggataaccgtcctgtttcatcttttccgaatataattcaattcttccgctcggtgtcttgagctttcccggaaaaagcggttttttccgtttggctttcatgaaggaatggcttgagagcgcttcgtaatcaatatcctcgatatacggattgtcgggaaagtccagcgcctgtctgattaattcttcatcagaatcctgaagctcctgctcggtaaatcccattgctccggcaagcagacggaacacttccgtattcgatttgctgtctccgtagggttcgatcaccggtttttgcagctgaataaaatgatgccagtaagacgtgtaaaaatccgtgttttcaaaagcggatgaagcagggagcacgatatccgcatatttggcggtttccgttaaaaacagatcgtgaacgactgtaaataaatcctcccgcagcaggccttttctgactttattcgcttccggcgcaaccactgcgggattcgtaccgtaaataaacagggagcgcacgggcggttttgtttctaaaagaacgcttccgagcctgttcatattaaatgatcgcggcttccggccgtaaagcagatcaggccgctggagcgcttgtctgttatagtttaataccgcgctgttgtgcttgattgcgcctcctccggtgttgagccactgtcctgtaacagccggaaggcaggcgacggtgcggacgatcattccgccattgtcatggtgctgaatgccgtttccgatcctgataagggaaggggaggtttccccgtacattctcgcaaggcgtctgatatcgtcggctttaacgcctgtaatagcagaaaccgtttccggatcatagtgtttgacatgcgcttttaattcgtcactgccttcggtgtattctgtgagaaatgcttcatcgtgaaggttctcagcgaataagacatgcatgataccgagggcgagtgcggcatctgtgccgggacgaatgggaataaaccaatcagcaagccggccggtttggttcttatgtacatcaataacgacaatcttagccccttttttccgggctttttgagcaatcatgacttggtgcatattcgtgctgacggcattgattccccaaaaaataaagagcttagcatgtatggtctcctccggatcagtacccgctccttctcccattgtatagttatagccttcagaaccggctttgctgcagatcgtccgttcgagatgactcgctccgagacgatggaaaaaacggcggtccattccctctgccgccagttttcccatattgccgtaaaagctgtacggaagaatgctttccgctccttcttcggcaataagctctttccagcgcgaactgatcgtattgattgcttcctcccaggaaataggcgcaaacgcggcttcaccttttttaccgatcctttttaacggaacggttacgcgcttctcatcataaatacgctcagccatgtgtctgactttgttgcaaatattccctgatgtgaccgggtgatcggggtctccctgaatgttaacgatttttccgtctttttttgtcacaagcaagccgcattgatcgggacagtctagtgagcacaccgacttaaagaccccgttcggctgtgttgcagcagaattcatagcccatttctcctctttgtttatattgtaagcattataacatttcaaaatcgaacgtcaattcagaaaaaagtgttgacattacggaaagacttttctatgatgagtttattcttttaaacagcctgacaatttcatcattttattttctatccagagaggtggagggactggccctatgaatcctcggcaacatttattgtgccaattccagcaagcgtatgcttgaaagataggaaagaatggtctatacatatttgtgcgcttcaagcgtataaagacggtatatgaatctctttccttctttgaggaaagagatttttttatgaaaaaatttatgtgaaaaggatgttttgcaccatgacggttttaattaccgcgccatatcacgacgaggggctgaaggagctggctgagctgttcggccggactgtgcaccggccgtggaagaagcacggccgggcctatcgggaagatgaattgatccggatgattcaagagacaaacgcgtcggggcttataaccgaacttgatgaggtgtctcagcgtgttattgacatattgccggattccgcttttatcggtgtctgcagaggaatgccgtctaatgtggatattgcggcggcgactaaaagaaaaatccccgttttctttacaccggcccgcaatgcccaggccgttgctgaaatgtttatcgggaatgtgatttcatttttgcgtcatacgtattcttcccatcagtggctgaaggacggaaagtggaatggtgattatttgcaggcttacgtcaaattcagaggaaatgagctgacggggaaaacagtcggccttatcggtttcggagctgtcggacagagaatcgccaggctattggccgcttttgactgcaaggtgctttactatgatccatttgtccgtcatgaaaaccgggagtatgaaaaaacgacgattgaacgggtattttctgaaagtgatattgtttccgttcacttgccgcgcacagaagaaaccatcggccttatcggcgcccggcactttcaattgatgaaacaggaagctgtttttgtcaatacgtcaagagcggcggttacagacagggaagagctgctgcgggtgctgaaagaacggcggattaagggagcgatccttgacgtgttttatcacgaaccgcctgaatcttctgattatgatttgatctctttgccgaatgtgttcgcgactccccatttagcgggcgcaacatttgaagtggaagatcatcatgtgaagattttaaatgaagcgcttttcaaatggaaacaagatcaaacctattcaatacgtgaactttataacaaaagagaacttgaaacggaaggaggaggctgtaatggctgaacaaaaaggctaccttgtatttgacatcgggactgggaatgcgcgagtcgcggtcgtgactgccggcggcgaagtgaccgcgcttgaaagggaagacattgaatatgtgacggatccgctttatccggacggacgatatttctcaccggaagggttatggacgcaaatcagcgctatggcaagaaaggctattgccaagagccctcatattacattaatcggaatcacctcaacaagccagaggcagggaatcgttttgatcaataaagataaaaaggcatttctcggtctgcccaacattgataacagagggcgtgaatgggaaggcggaattgaggcagaagaagtgcatcagcaaaccggacgtcttccgagcgctttattttccgccatgaaacttgtcggattaaaagccagacagccgtctttatggaaagaagtgaagtgcatcacaagcatcagtgactgggtgacatttgagctgagcggaattttaagctatgaaccgtcacaggctgctgaaacactgctgtttgacgtaaggaaaaaggcgtggtcagagaaattatgcaacatcttcggtgtgccttctgccattcttccttcactcgtccgatctgggacggttgtcggaatgttaacgtttaagaaagcggcggtgctcggtctttctgaaagagtgcctgtgattgcaggcgggggagacacacagcttgccatcaaaagtgcagatgcaaagccgggagatatcgtcattgtatccggcacgacgacgccgattacaaagataacagcggagaccggaaccgaaagtttagagaatgcatggctgaattgccatacagaagaaggtgaatggcttcttgaaacgaatccgggtgtaacaggactcaattatcaaaaattaaaatccattttttatccgaatgaatcctacagcgtcatggaacgggaaatcgcaagtctgccgaaacatgatcatgcctgtatatctgcgttaggctcctatttatctcctgagaaaaacgcactggcaaaaggcggatttatttttgacgctccgctgtcccaaaacttaagcagagcccattttgtcaaagctgcactgctggaaatcgctttttcaatcaaatggaactatgaggcgttaacagaggcggcttccttttcacaagattatgtgaaggtgtgcggcggcggtttccaaagtgatgctttgacgcagtttcttgctaaccttcttcaaaagaaaatctataagagagaggggttcagccaggcatccgcaatgggagcggtgatgatttgcaacgaagctctcggtgtgaaagcagagctttcgacctgcacaaaggtaattgagccggaagcggatcagacggatctcttcctatatgaagaatggaaacatacccaaaaattatttactcattttcagccggcggtgaaagcctgacttggggatgagatgacaacatgaaagattgctgaggaggaacaaaaatgcttaataaaataggaattccgaaacagctcgcctggggatttttaggggtcgtgctgtttatgatgggggacggccttgaacaaggctggctcagcccgtttttagtcgaaaacggcttgacggtacagcaatcagcatccttgtttacggtttacggtatttctcttgctgtggcgtcgtggttttcaggagtctgcctcgaagccttcggcgcaaagcggacgatgtttatggggctgttgttttacgtcatcggaacagccgcgtttatcgcatacggatttgagaatcttaatttgccggtgatgtatgtcacgtattttattaaagggctgggttacccgctgtttgcctattcatttttgacatgggtgatttaccggtcgccgaaaaacaggctcagtacggcggtcggctggttctggattgcatattgctgcgggatgtttgtattcggtgcttggtattcaagctgggccatcaaatccttcggctatttgaatacgctgtggagttcaattttctgggtatgtctcggcgcgttttttgctttgattttaaatagggaccgctttgaaaagaaaaaggcagataagcgggaaaaggcgcaggaattaatgaagggaatcaccatccttgctgaaaatccgcgcgtgctctctgggggatcattcgaatcattaacagcatcggaacatacggatttccggtattcctcccgatgcatatggcgcagcacggcatttctacaaatgtatggctgcaaatttggggaacgatttttctcggaaatatcgtctttaacttaatcttcggcgcagtcggcgatgccttcggctggaaaaagactgtcatgtggttcggaggagtgggctgcggcatttttactcttttattatattatgctcctgttgtatcacatgggaatttgctgttcgtcagcattgtcggttttatatggggagggctcctcgccgggttcgttccgatcggggctatcgtgccgacggcggccggcagcaataaaggtgctgctatgtctgtgttaaatctggctgcgggcctgtcggcatttgtcggccccgcgcttgcctgggcgttcatcgggcttgtcggcgcacaaggcgttgtatggattttcgcagcgctctatttcgtaagtgcgatcttgacaaatcaaatcaaaatacctgaagagaaaacggcaaaacacaataaagcattgcctgaatacgcttcttaacagcagcgccccgaaaattcggggcgtttttttacggctgatgaagaaacccggcaaaccgctgaatttgttcacgtaacgattgtttgttttcgtgaaattgtttgaaacgatgtccgtttgctccggacggatgcgggaagccttccagaatgaccgcatggcccattctgcggttcttcttcagcgtgcggcaggctgattctgctgcttttccgagagggataagcagaatgtcttttttcatcatttctatttcatccggaaaacatgtcagcgcgtaacggctgagaagagctgatctgctgatggccggccggtgtcccgtatagtttttctgtttataaaaaacagggtgtttgataacggatgtcgtatgaagcagctccctttttgaatcaaaaaaccgggatgaatcctcaacgtgaagcgcggccggcagaccgcattcattaagcatttcgatgatgtgctgcctcatggaaccggaaagtccggccgctttttttgtctcatatgctatcacctcaagagattcgccgttttttaaaagctgtgccgctgctttgtacgcccgctgcatctgaaaaaaaccgggtgtaattccggagatgacaaccgcagcatgtgggttgatatactcattatgaggcgaataatacatatccagatctccgtccttggctaaatggaactccgaagtcagcaaatccgattttgtaaatcctcccgaagatgataatgctttaagctgctgcaaaaaatgcgcaagccgctcacgatcgcaaatcatgttatgcctccttgaatccgccagtttctcttagtgtcatcaaaaacgtcggatgacatgcaggctcataaaccgcttttaccggcgttccagagcattttcaggacgtgaggcgttcctttaacttcggctgccgtcgtttgcacggctgtttttttagtaagaaagtcttcctgcagttctttctgcttttgtgataacaaacgggtttctgttttgatttcttcaacggacgtctgcatggacgctgtcacggcgttaatcttctttatatcaggcgctgtgtttcttttaaaatgcacggcggatacggctgcataaattaaagcggcagccgcaacggcagcactgatatacaaaatgatgatcatctgcttttcactcctttttttcagttgataccctttacggatcgtgctgaatcattttatttgctaattgttttttttctgcttataatgtgaaatcgtacataaggacattcagaaagggtgaaagacatggaaagcttacaaaacaaaacggctcttatcacgggtgcgggcagaggaatcggccgcgccgccgctatcgctttagccaaagaaggagtcaatatcggtttaatcggccgtacagaagcaaatgtcgaaaaggttgcggaagaagtgaaagcccttggtgtaaaggcatcattcgctgctgccgatgtaaaaaaccaaaaagaggttgaacaagccgtctcttctattaaagaagaactcggtgaggttgacatcctgattaacaatgccggaatcagcaaattcggcggatttttggatcttacgcctcaagagtgggaagacatcattcaagttaatgtaatgggtgtataccacgtgacacgcgccgttcttcctgaaatgattgagagaaaatcaggagatatcattaatatttcttctacggcgggccaaagaggcgccgcggcgacaagtgcgtacagcgcttctaaatttgccgttctcggtctgaccgaatctctcatgcaggaagtcagaaaacacaatatccgtgtcagcgcaatgactccgagcacggttgcaagcgacatgtctattgaattaaatctgacagacggcaatccggaaaaagtcatgcagcctgaggatcttgcagaatatatggttgctcaattgaaattacacccgcgcattttcatcaaaactgccggtttgtggtcaactaatccttaatcaaaaggggacctgtctttgtgacgggtcttttttgttttcgcaacccgattaaataggcataaagatccgtttttgcagaaaaaagagtgaaaaagaaaccgatatcagctataattaaactaaataaactatgtaccaaatgttcaataagattatttttccccgcatccaaaaaacaaatcaatataaaccaaactgtccgaacaataaaagggaaaacgggatataaagagaatatttagtacatggaataatttgttagaaggaagggtgggcacatattgaaagaagaaaaaagaagttcaaccggttttttagtaaaacaaagagcctttttaaagctttacatgattacaatgacagagcaggaacggctttacggactgaagcttctcgaggtgctgcgttcggaatttaaacccatcggttttaagccgaatcataccgaggtgtaccgttcacttcacgaacttttggatgacgggattttaaagcaagtaaaagtgaaaaaagagggagccaaactccaggaagtcgttctctatcaatttaaagactatgaagctgcaaagctttacaaaaaacagctgaagacagagcttgaccgctgcaaaaagctgatagaaaaagccatttcagataatttttaaatccggccggaacgctcccggcctcccgggctcaaaaggtttgttctgtgattcattatacataataacaggctcggaacaatacatatcaataaaacctccaaacttgacatcgactcctgaagtggtaacataaaaaacgtgtgaaaaatacgaacaaaatacgaacaagggagatgttaccgatcttagatcaaaagaaagttgcttttatcggagcaggatcaatggctgaaggaatgatatcaggcatggtccgcgcaaaaaaaattcccaaccaaaacatctgcgtgacaaaccgccgcaatacagagcgactcgctgaattggaacatcaatacggaattcaaggcattgcttttgacagcatgaaaaccgaagacattgatgtctttattttagccatgaaaccgaaggatgctgaaatcgctcttgctacgctgaaacggcgtattcaacctcatcaaatcatcctgtctgttctggcaggcataacaacctcatttatacaacaatcattacatgaccgtcagccagttgtaagagtgatgccgaacacatccagcatgatcggcgaatcggcaacagctgcggctttcggagaccatgtctcttacggttcagcaaaaaccgcggtatctcttttggaatgcctcggggaagtgtacgtgatcaaggaagatcagatggacattttcaccggcatcgcaggcagcggaccggcgtacttttattatttaatggagtttattgaaaaagcaggtgaagaagccggcttagacaaacggctgtcccgcaaaatcggggcgcaaacgttattgggcgctgcaaaaatgctgatggaaacgggtgaaaaaccggatgtgcttcgggaaaacatcacctctccaaacggcacgacggaagccggcctcgatgcgctcaggtcagaaggcggcggagaagccattgccaaagccattaaacacgcgaccgaacgttctattgagatcagcaaaacaattgaaaaaacggcagcactataatcgttaaaaaacaggagtgatacagtgacgtctcggacgaagatcaaaagagtcgcggtgaaaatcggaagcagctcactgacgagcctgcacggggaaatcagcagaagaaagctggaagcattggtggatcaaatcgcacagctgaaggacagcggctatgaagtgattttaatatcttccggcgcagtggcggcaggttatcggaagctcggatttattcagaaaccggaaggcctccctgaaaaacaggcttctgcttccatcgggcagggattattaatggaggcttactcaaagctgtttttagcgcacggttatgtcgcatcacaaatattaattacaagaagcgatttttccgatgaataccgctaccataatgtgcgcaatacgatgaacgtccttttggaacggggcattattccgattattaatgaaaatgacacggtcacagtcaaccggctgaaattcggagataacgatacacttgcagcgaaggtggcaggtttaattgatgccgacatgcttgtaattttatcagacattgacggtttatatgatgataatccgcgcagcaacccgaaagcgaaaagaatcagacatgtaagtgacatcactccggaaatagaagcaagcgcgggagatgccgggagtgaaatgggaaccggcggaatgcgttcgaaactggatgcttttaagattgtgatggcctccggtattaaaggctttctcgggcaggctaacattccggacattctgcttcaagcggtagatgaggcggctgaaggaacttattttgaagcggaaggaaccctgccgttaaaccacaaagaacaatggcttgcatttaattccggccccgaaggcgaaattgtgatggaaaagaaaagcagccgcgatgtcgcaaacggaaatatggcgctgtcaccgcaggatatcgaacagattaagggcagattcagcagcggagcggttgtcaggctgcttgatcagcagggagaagagctcggactcggcatcgtcaactattcctcagcccagctgaagacatttaaagaaacgcctcacaaacagaccgatcaatcagtcattgatccggaagcgtttgtctgccacgttgaactatccattccgatcggctgagaaagatctataaaaatatgaaaaagcccgaggcttcgttttgaagctcgggtttgttttttattgatattgttcaagtttggagaaaaattgaatgacaaaatgatagaaatcatttgcagacggagccagttctcttccttttggtttaataatgcctacggtccgcttcacttgaggaaattcaatcggaattttgaccgtgaaccggggtgtggtttctgcaaaggtgctttcaggcaataaagtaactcccatccccgcggagactaatcctttaatggcatctaaatcctcgccttccgtcgatacaagcggcgcaaagccggcctgtctgcaagcgtcaatcgccatgtttcggagaataaacccttcaggaaataaaacgaattggtccccgcgcagatcaattaaatgaatatttttctgtttggcaagcggatgatgcagcggaacaagcgcgtaaatcttttccgtgaataagatattgcctgttatgtcggggaattccgtcggaacggggccgagcagcgcagcatctatatccctgtttcttaccgcttcgattaaaaacttataagaaccctggcggagcaaaaactcaacgttcgggtattcctctttaaatgccgaaatcacagtcggcaaaagctggcttgcaaggctcgtcggaaatcctattttgacggttccgcgattcggatcaagatattcatcaatttgttccttcgcataatcaattgctttcatcgccgttttaacatgttctaaaaattgtttgccgatcggcgttaatttaatatttctgccttcccgttcaaataaagtgactttcagctcttcttcaagatttgcaatctgccggctgatggcggattgtgcgacatgcagatgatcagccgcttctgacacatgttcccgttctgctacctccataaaataccgaagctggcgtaattccattgcgttcacacccatctatctcattttgagatgtatttgatctaaattatatattgtttatattgttttgaaaacttacaattaatttaaagttgtcagattttatgaccgataattaacggaaactgatcgggggagaggaattatgacttacaatcaaatgccgaaagcacaaggtctctaccgtccggaatttgagcacgatgcatgcggaatcggcttgtatgcccatttaaaagggaaaccttcacatgacattgtcaaaaaaggactgaagatgctttgccagctggatcacagaggaggacagggcagtgatccgaatacgggtgacggcgccggcctgatggttcagatccctgatgctttttttaagaaagagtgcggagaaatgaagctgccggaaaaaggccgttacggggtaggaatggtctttttctcgcaaaatgaagaggaaagaaaaaagatcgaaaaacaggtgaatgcattcattgagcaggaaggacagatcgttctcggctggagaaccgtccctgtaaatgtcggaaaaatcggaacagtggcacaaagcacttgcccgtatgtgcgtcaagtatttatcggagccgcaaacgatttgaaagacagccttgcttttgaacgcaaattgtatgttatccggaagcaggctgaaaattggggcgttcaagaacagcttgatttttacttcgcaagcctgtcaagccagactattgtttataaagggttgttaacgcctgagcaggttgacgctttttatttggatttgcaggatgaaaccttcgtatctgcattttcactcgtgcattcaagattcagcacaaatacctttcctacttgggaacgtgcccatccgaaccgctatctgattcataacggagaaatcaatacgctccggggcaacatcaattggatgagagcgagggagcagcagttcgtttcagaaagcttcggagacgatcttcacaaagtgctgccgattttaaatgctgagggcagtgactcatccattcttgataatgcgtttgaatttttcgtgatggcggggcggaaaccggcacatacggcaatgatgctgattccggaaccatggacggaaaacactcacatgtctaaagcgaaacgggctttttatgaatatcacagctctttaatggagccgtgggacgggccgaccgccatttcgtttacggacggaaaacaaatcggcgccatccttgaccgtaacggcctgcgtccggcacgttactatgtgacaaaagatgaccatattattttctcatctgaggtcggcgttattgaagtggagcagaagaacattcttcataaaaaacgtctggagcccggaaaaatgctgctcattgacttagaggaaggccggattatttcagatgaagaagtaaaaacagaaatcgccaatgaattcccgtatcaaaaatggcttgaagaagaattggttcaagtgaatcctgacccggaaatccgggaagaggaacaattcgatgatcttctcgtccgtcaaaaagcgtttggctatacgtatgaagatatccagaaatatttaattcctgttattaaagaaggcaaggacccgctcggctctatgggaaatgattcgccgctcgccgttttatccgatcgcgcccaatcactgtttcattactttaaacagctgtttgcgcaagtcacaaacccgccgattgacgcgatccgcgagcagcttgtgacctctacggtgacatggcttggggctgaaggtgatctgctgcatccgagtgaaagaaatgcacgccgcataaaattgtatactcctgtattatcaaacgaacagttttatgcgctgaaaacacttgtgcaccctgatattaagagccagaacatccgcacgctgttttccgatgacctggaaaaaggcctgaaggatttgtttcagcaagcggaaaaagcgatcaaggaaggcgtatctctgttaattttatctgacagggcaatgagtaaggaattgacgccgattccgccgcttttggccgtcagtgcgctgcatcagcatttgatccgtcaaggcctgcgaacaaaagcaagcattatcgttgaatccggggaagcgcgtgaagttcatcactttgcggctctcatcgggtatggtgccgatgctgtcaatccgtatttgacttatgctacgtataagcaggaaatcgatgaaggccggcttgatattccgtatgaagaagctgtcagcaaatacggaaagagcgtaacagaaggcgtcgtgaaagtgatgtcaaaaatggggatttcaactgtgcaaagttacaggggcgcccaaatttttgaagcggtcggcatcggtgaagacgttatcgccaaatactttaccggtactgcatctcagcttggcggaatcgatatcgagacgattgcgcaagaagcgaaacagcgccatcaagcggcgtacaaggatgattacagccaaactcttgatcctggaagtgaattccaatggcggaacgggggagagcaccacgctttcaacccgaaaaccatccatacgctgcaatgggcctgccgaaaaaatgattacagcttgtttaagcagtattctcatgcagcggatgaagaacgaatcggatttttacgcaatctgttcgccttcaaagaagaccgcaagcctttaaaattagaggaagttgaatcagctgcgtccatcgtgaaacgttttaaaacaggagcgatgtcattcggttcattaagcaaggaagcccatgaggctttagcgatagcgatgaacaggcttggcggaaaaagcaacagcggagaaggcggcgaggacccgaaacgtttcgttccggatgaaaatggcgacgacagaagaagtgcgattaaacagatcgcctccggccgtttcggcgtaaagagccattatctcgtcaatgcggatgaattgcagatcaaaatggcgcaaggagcgaagccgggagaaggcggtcagcttccggggaacaaagtatatccttgggtcgcggatgtccgcggttctacaccaggtgtagggctgatctcaccgcctcctcaccatgatatttattcaattgaagatttggcgcagctgatccatgatttgaaaaatgcaaatcgaagcgcgcgaatcagcgtcaagctcgtgtcaaaagccggtgtcggcacgattgcggccggtgtggcaaaaggcactgcggatgtcatcgtcatcagcggctacgatggcggaacgggcgcatcgccgaaaacgagtattaaacataccggtcttccgtgggagcttggtcttgcagaagctcaccaaacgctgatgctgaacggtttacgggatcgcgtggtattggaaacggacggtaagctgatgacaggccgagatgtcgtgatggccgccttgctcggtgcggaggaattcggctttgctacagcgccgcttgtcgttcttggctgcatcatgatgcgcgcctgccatttagatacatgtcctgtaggtgtcgcgacgcaaaatccggagctccgcaaaaaattcatgggcaatcctgaccatatcgtaaattacatgctgtttgtcgcagaagaagtgcgtgaatatatggcgcagttaggctttaagacgcttgatgaaatgatcggacggacagacgttcttcatgtcagtgaacgtgcgaaagcgcattggaaagcgggccagcttgatttatccacactgctgtaccagcctgaaggcatacgcactttccgtacggcgcaaaaccataaaatcgacgagtcgcttgatatgacggttattcttccggcggtgcaggctgcaattgaagccggtcaggaagcggaagctgaaatcaagatcaataatacaaaccgcgtagccggaaccgtgacgggaagtgaaatttctaaacgctacggagcggaaggcctgccggatgatacgatcagacttcattttaccggatcagccggacagagtttcggtgcatttgtccctaaagggatgacgcttcatttgaacggggattcaaatgactacgtaggcaaagggctttcaggcggaaaaatcatcgtgaaagcgcctgatgccttcaattatgaaacacacgataacgttattatcgggaacgtcgcattttacggagcaacaagcggggaagcgtacattaacgggcgcgccggtgaacgttttgcagtccgtaacagcggagtcaatgtcgttgtagaaggtatcggagaccacggctgcgaatacatgacaggcggccgggttgtcgtcctcggcgaagtcggcaaaaacttcggggcgggaatgtcaggcggtatcgcatacgtcctgagtgaagatgccaaagcatttaaacgcaaatgcaacatggaaatgatttcatttgaaaagctgacggatgaggcggagatcaaagaagtgcaagaaatggtcaaacggcatgcggcgctgacaaacagcaaaaaagccgcaaatctcctggacaattgggaaaaagccgcagaaacctttatcaaagtcattccgaaaaactataaacaaatgctcctcagcatcgaagaacaaaaagcggcgggtttatcagaagaagacgcaattatgtatgcttttgaagccaatacaaaggttcagcaaacgcctgccaaagatcaaaaacaagcggtagtacagtaagaaaggggagaggaacatggggaaaccaactggattcatggaagaaaaacgagaaaaaccggctgagcgggaccctctcactcgcttaaaggattggaaagagtattcggctccattttcagatgaagcgtcaaagcggcagggggcgcggtgtatggattgcggcacaccgttttgccaaatcggcgctgatatcaacggttttacctccggatgcccgatttataatctgataccggagtggaatgacctcgtctatcgggggcgctggaaagaagccttggagcgccttctgaaaacgaataactttcctgaattcacagggcgggtctgtcccgctccttgtgaaggatcttgtacgctggccatttcagatccggctgtttcaattaaaaacatcgagcggacgatcattgacaaaggttttgaaaatggatggattcagccgagaattcccgcgaaacgcacaggtaaaaaagtcgctgtcgtcggttcaggcccggcaggtctggcaagcgctgatcagctgaatcaagccggtcattccgtaacggtctacgagcgtgccgacagagccggcggcctgctgatgtacggcattccgagcatgaagcttgagaaaaatgtcgtcgaacgccgtattaagcttttgacgcaggaaggtatagattttgtgacaaataccgaaatcggcgttgatataacggcagatgagctgaaagaacaatttgatgccgtcattttgtgcacaggcgcccaaaagcagcgcaatctgctgattgaaggccgggaagcaaaaggcgtccattatgcgatggactatttaacactggcgacgaaaagctatttagattccaacttcaaagacaaacaatttatagacgctaaagggaaagatgtcatcgtgatcggcggaggagacacaggagctgactgcgtggcaaccgcgctgcgtcaaaaagcgcgcagcgtgcaccagttcgggaaacatcctaaacttcctcagacgcgcacgaacgacaatatgtggcctgaacagccgcacgtctttacccttgaatacgcctatgaagaagcgcaggcaaagttcggcaaagacccgagagaatattcaattcaaacgacaaaaatggtggccgataagcagggccgcttacaagagatccacaccattcaaatggaaaaagtcagaaacgaattcggaaagtatgaatttcatgaactgcccggtacagaaaaagtctggcctgctcagctggtgttcatcgccatcggttttgaagggacagaacagccattattgaaacagttcggagtcgattcggcaaatcataaaattcaggcggcatatggggattataaaacgaatgttgacggtgttttcgccgcaggggatgcgagaaggggccaaagcctgattgtatgggcgattaatgaaggccgggaagcagcgcgcgaagtcgacagttatttaatggggagcactgttttaccgtaaataaaggggtttatttataaaaccggctgggatcagccggtttttcgtattgaaatggaacctccttcttcttgtattggtcatataaaggtaatgtggaaatggaggataaatatggaattttgttttacagagcggagagattgtttttttccgcagactgatacgatttgcaagccttgcgcaatcgatcagggtgctgctgacggcggaagtcatcgctgccgtttaaaatgacgccttaaaaaacatgacgggctctgtgtgtctgcagtcgatttgcgggcagattttaatcgatgaagaaaaacatattgaatttcaagcggaaacgcttaaaaacaaataagggaacggacgggtccgttcctttttttagacatctatacgaaagccgatattgccgaactgccgtccttcccgcattctgttaaaagcgggagctgcttcactgagagggtacatgcggtcgataatgggacggagctcgcagcggtttatcaattccagcatatccgcgaattcctcattgcttcccattgatgtaccgagaatatgaatctgcggaaaaaacagcgagcgaatgggaaatccgagctgatcgcctgaactggcgccgaatgttacgatccggccattcggtttaataatgtcaagatagtgttgatataaagcggggcctacaccgtcaagtatgatatctgctttttcgccattcagcgcctcattccagtcaccgtagctgtcaatcgcccggtctgcaccgtatgacagtgcggtttgttttttgttttcactgcgggaggtgacgctgactgtcgctccgatagcttttgccattaataaggcatatgttgccacgccgcttccgatgcccggaaggataaggtgttcgcctttttttaattgtccttttgtaaataaggcgcgataagcggttaatgctgataacggcaggacgcccgcttcctcccaagtcaggtgttcgggttttaaaacggcattttccgcaggaacgatgacataaggtgaaaatgttccgtcgctcggaccgcctaaaatatcagggacggctggtacgtcctcaacagtcttccaattcagtaccgggttgatgatgacttctgcattcagtaaatgagaccggacgccgtgtcctatttcggttacgattcccgcgccgtctgaaccgagaataaattcatggtttccggtttcgtgttttttcattaaaaacaaatcacgatggtttaatccggctgttttcagctttatttttacttcgccgtttcccggccttttgtcaggtgcctgcctgaaattaaagccattttcgtgtatgataaggacattcatgattcttctctcctttatgattgatgagaaaaattttacaggctgtatcagctgcagtaaataaatgaaaattgatagccggctatcaataaaaatcatagcaagaaggtgcccttagatggaaagcggagacttaaagatttttcaggctgtcgcccgcaaaggaagtatttcaaaggcggcagaaagcctgcattatgttcaatcaaatgtgacaaaccggattcagcagctggaacggcaattgcaaacacagcttttttaccgcacaaatcggggaatgacgctgacgccaacaggtgaaaacttattaaaagacgcagacagaatccttcaattgctgcatgaggcgcaaaaaacagcgcgagaggcaggcgatccgaacggcccgcttcgaatcggttctcttgaaacggcggcagccgtccatctccctcaatttttcacggagtattgcagccgctacccgaaagtacagctgtctctgtcaaccggtgatacacataccttagtgcagcgcgttctacactatgagctggacggcgcttttgtttacggaccggtcgaatatgaagatcttgagcaagtcgctgtatttcaagaagaattggtcttggtttcaaataagcgggaaggcagtttgcaagacttgctgcgagagccgattctgtattttgccgcgggctgttcgcaccgccgcaaaataaaaaacatactgaaagaagaggcagtgcccgcacataaaatcattgaattcggtacgttggaagccattattggggcggtgcaggcggggatgggggtctcctttctgcctgcatcagccgtccgttattttcaaaacaggaaaaatctttttcttcatgagcttcctgaacattttcggaatatgaatatatcattcatctaccggagtgatttatttttaacatcggcgtttgaagaactgctgaatggattaaaaacattatcgaacagaagatgagaaaacaggacagctgtgtacgccaattttttttcgttccggtttttctcaaaaagaaagcgggtatccgggctgagctcgatcagcgtgatgaaaaactcggctataaaatcagagaagcacaaatgaaaaaaataccgtatatggcggttgtgggagatcaagagtgccgccaccattctgtacatgtaaggcaatacgggcgggaaaacacatttgaagagaatgtgagtgattttatttcccggatcataagagagacaaaacaaaaaatagagattcaagaaaaataacattgacatatcgcaaaatcacgatataataaagcgtatgaaacctattgatgtttttaaagcgttgtctaatgagtcacggcttgagattttacaatggctgaaagagccggaccgtcacttcgcaccgcatgatggcattgatatgaatgagatcggagtatgtgtcagccagatcaccgataagcttcagatgacacagtcaacggcgtctcaatatctttccattcttcagcgcgcaggccttatccaaacaaaacggattggcaaatacacctattataaaagagatgaagatgcgataaaggcgatggccgattattttcagcgcgaaatgtagggctgaatcctttagaagagggattcagtttcttttttcgactacacatcgacatattgcgatttgtttctgtttgttcaattctttatatcgatatatcacaatatatctttatataaattatcaatgaaggagtgtgtcaggtgcaaaatacctggaagatttacattttggcaattatcagctttttagtggggacgtctgaatatgtgatatccgggatgcttgataaaattgcaggttccttgggagttactgtggcagcagcagggcagctgattacgattttttcacttgtttatgcaatcggaacgcctgtcatgatggcccttacagcaaaactggacagaaggaagctcatgatctatgctcttggattgtttgtaatcggaaatatcatttcatttcttgtacagggatacggcttatttgcggcagcccgggtgatcatggcgcttggagcaggaactgtggtggtcaccgcgcttacgatcgcagcaaaaatcgctcccccgggaaaacaggcaagttctctcgcgaccgtcattatggggtttacggcggcgctcattatcggtgttccgatcggaagaaccgtgtctgaagcttttggctggaaggtggttttcgccggaattgcggcaatcggaatcattgccatgcttattatacgttttgcgttgcctgagataaaaggagataaaccggtgccgcttattcagcaattttctcttttgaagaaacgaaaggtggctgtcgggcttgctattacgtttttttggctcggaggctattcggttgcgtatacgtacctttctccgtatttactgaacgtcactcatatcggcagcggaatactgagtacattgctgcttattttcggtgttgctagtcttgccggttctaaagcaggcggtttcagtgctgacaaatggggggcgcgtatgacattaaccggcggaatggcgcttcatgctatcatgctcatgttattgccgtttgtcacacattctgctttcggagcggcggcagtgcttattttttggtccttcgccgcctggtcatcaggacctgctcagcagtatcatttggcaacgatggagcctgaatcatcgggtgtattacttggcctcaaccagtctgtgatgcagctggctatggcggccggggcgggcatcgggggcattgttgtcactcatctgtctcttgcgtcagtgacatggatcggatcagcgggtgttgtcatcgcgatgtgcggcgtgctttcacttgcctcgttaacatctgaaaaaccctcatctgaatacagtgcagaataaacaaaagcctcatttctcagcttgagaaacgaggctttttgcctagttattttttatattgtttcaagtttacgccgattgcggctccgtttcggcttgagtcggcaactccggtaaaggtgccgttttcacgatcgatcaggatgctttgcacattaccgatatcaaccgggctgctgccgaatttatgccccatttcgttcagttttgtgcgggcttcttccggcactcctttttcatatctataggatgtcatgctgtttgtgtaaattctcggctcttcgaccgccgctttcagatccatgccgtactcgactttgttcaggatcgtttgcaggacggaagaaataatcgttgctccgccgggagagccgacagtcaggacaggttcgttatttttgaataaaatagtcggagtcatgctgctgagcggacgtttattcggctgcacttcatttgcgccgccaggcaccgcatcgaagtctgttaactcattattcaacacaacgccgtatccgggaaccataatgccggaaccgaacagctgttcaatcgttgtcgtataagatacgacattgccgaagcggtcggttaccgtgaagtgggtcgtttggccttcttgtttgtcagtcggctgcttcacttgtttatagtttgcagaaccttcctgataggcccaagggtcgccggctttcggttttttattgactttatcaatatctatcagctgtctgcgggcattgatataatctggattcaagaggcctttgagagggacgttgacgaattctggatccccggcaaatgcggcgcggtcagcataagccaaatgcatcgtttctgcgagaagctgatatttttgccaagaacggatatcatattgagaaagcttaaaatcatccagaaggttcagcatttgcaacaggaaaacaccgcccgagcttggaggaggagcagttgcgatatgatagccctggtaatcccccagatcggttcgtcaatcgtcacattgaagtttttgatatctttttctgtcattgagccgccgaattcctgcactgtttccgcaagctttttggagaatgcaccgtcatagaatgcttttgtgcctttgtacttaatagctgtaaatgttttggctaagtctttttggatgagtgtgtctccttctttcagaggttctccgtccggaagaaacacgtcttttgcagcggtgtgtgataatttgtttttataatctgagatggcatcagctaaaaccgaatcgatcggaaagccttttgaggcaagtttaatggaaggggtgatgagttgtttcatggagcgtgtgccccatttgtcgagcgctttttcaagtccttttaatgttcccggaacaccgactgcagtccctttagtaacgcgttcggagaaagggatggctttgccgttttcgtcaaggaacatatccggtgctgcgcctgccggtgcgcgttcccggctgtcgataatggtggtgtctttcgtcttcgcatcataaaccatcataaatccgccgccgccgattcccgacatcataggttcagttacgtttaatgcgaattgaatggcgaccgcggcgtcaattgcattgcctccttttttcagcacgtcggcaccgatttgtgaagcgagaggatgggcggtggcaaccatgccgtctttgccgacatctacctgtttgtagtcgtcataggaaaacgggtgtttcttagcctgagcgtgataagggatgcttccggccgtgagcaaagtactgagcagaacgataaaacagagattcataaactttttctttttcatagtctgcctcctttgttttccgcttacaattatagagtaagtaaaatgtgctgttttcacaagtgacaaacggaatagtccggtgcgcaaaaagccggagtttctgtgtgaatgtaatcagtcgcaaataggctaaatgggaaaccgggcagaaaaagctgtgaaacaagcataaagacaaaaaataagctacaataaacaaaacagaattcactcacatgacatatgaaaggaacgtgagccatgtatttaacgatcaaagagacagctgagtttaccagtcttcctgaagaatatgtgcacaatcttgttttgacgaataaaataagggccgtacatgacggacagcaatatttaatcaacaaggaacaatttcaaacccatctcgaacagctggaaaaatataaggaaatgattcaagagtttttaaatgagccgcttcctgaagacattgatgtaaaagatgaagactaggacacaatttcatattgtgtctttttttttcatttttttcggttgctcacaaaaaaacgaatgctcagatttcgttttaagggcgttgtttttcttttttaataccgtgagtctctgttgatttaaaatcccgtcatcgggtcgaaaatgatgttttgaagacttcgatgaaactgcgtgccttattccccttatgtaacactatgtatattatgttacataaggccctttatcctttatcattcaacaggtttcggctataatagtaacataatgctcaatatgttactttaccaattataaggggttttttgatgcatatcgtacagccgatccgaagtttggagaagatccaggaagtcaaacagtatttaatgaagaaaagtgatcgtgattattttttatttattttcggcatgaacagcgcactgcggatttctgatgttctgccgcttcgcgtgagggatgtaaggaacaaagaccatgtgtgggcaaccgaaagcaaaacgagaaagaaaagaaaaattctgatactggagtctttgaaggccgacatatacgcttatacaaaagacatgaaagaggatgactatttgtttaaatcgaaacggacgaataagcccatttcccggattcaggcatacagaatattaaaggaagcagctgccgcgtgcggattggaggaaatcgggacgcatacgcttagaaagacgttcgggtatcatttttatcagaggacaaaagacattgctgaactgcagaggattttgaatcattcttctccgtctattacaatgcgttatatcggaatagatgaagatacgacgagagccgcctataaagtgttcggagggctgtaggcttgaaaaaaacggccgccagcgttactataatagaagcaggctctagtagcacagcggatagtgcagcagtttcctaaactgcaggtcgggagttcgaatctctcctagagcgttttcgacataagataggtgcggattaataatgtcggcaagacagaaaaccccttgttatacaaggggtttttgagtttaatattttgcaagaacctggtggaaatgatgtgaaaaaagcccgctgtaagcaagcgggctttttcttatatgacagcatcaaattgattgactttccaaacgttgttttcttttacgaatgttacatcgcgttttgctgacggtgaaccgtcaagagtcggtacagtgaagcggtatgtttgaacgcttccttttttagaaagaagagtcatttttgcttttttccaattcaggaggttatctccgtcgccgagcggaacagccaatttgccgtcttttacagtgaagtggtaatctttgagccctttgtcaatcgcttgctttgtaaaagcgggtgtcagatattttacggctttcgcttttgttccgaggtctttgcacataaagacgtattgaagattttgatattcaaacggttcagatgtgcagtttgcgtttgatttaagcgcaccgccgctcatcgtgttccagaaatgttctctcgctgacagggccagctgaagtgcttgtttttgtgtaaggtcattaggtgcattttttgcggtcgccgcagtgcccaatgacagaatcaatgtaatagtagtgaggaataatagccattttttcatgatataatctctccttcaatcaatctctttctcttatgttacaaatgttacaataattacgataagattacaataccttttcagaaatattttccggactttttatttttatggtttatttccatgtaagacgtgagaataagataaagagtttcattgaacaaaaggtttttacaagctgtctgctgaataataaaatggaagaaaatcaaaaaaggagtcctacatatggaagtacaagatcatttagaaacagcggaaggccgcggccagtctgtctggcgatcgatgtcactgtttttagtgccgctgcttttaagcaatgtattgcaatctgtcggccaattggtcggaatggtatttgtcggaaggtggctcggagttgatgcgcttgccgccgtatcgtctttttttccgctgttttttctgctgatctcctttacgatcggaatcggttcgggaagttccattctgatcgggcaggcttacggcgcgaaaaacgaagagaggatgaaggcgattgtcggcactacactgacttttacctttatgctcggtgttgttctggcagttgtcggcagtgtgtttacgcttgatattctgcggctgatgggaacgccggaaaacgtaatagatgtcagtgtccgatatgcgcgtattttgttttgcgcaatgccgctgatgtttttatattttgcgtatacgacatttttacgcggaacgggagattcaaagactccgttttatacgttaatcgtcagtacagtcataaacatcggtctcttgcccttattgattctcgggcttttcggacttccgaagttcggcatttacggttcggcgtatgcaaccgtgatttcaaacatcgtgacatttatcgtactcatggtttatttgcggaaaaggaaacatccattggcatttgaccggactgcgctccgttctcttaaaatggacaaaaagctgctcgcgcttttactccgtctcggtattccgtcaagcatcaatatgattctcgtatcactttctgaaattgcggtcatttcatttgtcaatcattacggatcaaacgcgacggctgcttacggggtcgtcaaccaagtggcgagttatgtgcagatgccggcggtaagcctcggtatcgccgtttcaatttttgccgcccaatccattggcgccaatcaattcggccggctgaagcaggtcatcaaagtcggcatcggcctgaattatttgatcggcggggttttgattgtgctgatttacaccttctcccggcagatactggctttgtttttaaccgatcaggatacactccgcattgcccgcaatctgattatgattaccctttggagctatctgattttcggtcacgctcagattgtttcagcaacaatgcgggcgagcggtacggtgttatggccgacgattatcagcatttttacgatttggggaattgaagtgcctgtggcctttattctttctcattatacgaatctcggcattctcggcatttgggtcggttatccggcggcttttgtcgtcagcctgctgctgcaatacggatattaccggtttgtatggaagaaaaaacagattacccggctgattcaataaggttttaccgcacatcgctcagttcatacgggcgatgttttttttagagaaggaaaatgagtttagaaaatggaattcctatacatgctagaaaacaaggaaagggcaggtgcttatgacgattgaacatacgacttatttaggagtttcagccataaaggcggagactgatcaggctgaatgcatcattgtgccggagtggggatcaaatgtcatatcgcttcgggataaaagaaccggtatgcggcttctgagagaaccggaaactgcggaggaattcctcaaaaaaccgatgctgtacggcattcccgttttattcccgccgaaccggattacggacgggacgtttcgttttgacggccgctcgtatcaattcgagataaacgaagaggataaacataatcatattcacggctttcttcacaatcagcattggaaagcggcagcagcgaaagaagagggggatggaatgacagtcgaaacagaaattgatctttcaaagattccccgtgttcataaacaatttccgcacgatgtcattgtccggatgacctatacattaaaagacaatgtgtttacgcagcgggcgctgattatgaataagggaacggaggcttttccttgggggctaggctatcattccacatttgttttcaatgaagagcaatcccgtctatttttgacggctgaccgcatgtgggaattaaatgaacgtttcgtaccgacgggccgtttattggatgttcctgataaagaagcgttccgtcatgggatgtctttgaaaaataaacagtttgacgatgtttttctttcttccggacggaatggcggcaataacgaagctgttatttatcatccgaatgagaaattatccgttttgtatcaggcagacacgtctttcaagcattgggtggtatataacggtgacggaaagcaggggtttgtcagtcttgagccttatacttccgttacagatgcatttaatctgaatcagcctgcatcactgacagggcttcagattctgaaaccgggcgaagaagcggctgcgtcatccgggatcaccattttgcatgacgaagaataggaaagaggcgggataacattgaaaacatatgtgaaacgcttgtgcgcggtgattctgcttttgatcattgccgaagttccttatattgatgatgcggctaaggcggctgaacaaaaaaatactttgcaaaaagagctggaacacattctggatgaagaacccgctttaaagggggcttcagcgggcatcattgtccggtcagcaaaaacaggggaggtgctgttcggcagccgggaagatatgcggctgaggcctgcatcattgatgaaactgctgacggcatctgcggcgctttccgttctcggagaagattacacctttaagacagaagtacgggcagacggcgccgtgaaaggaaaacagctgcgcggaaacctttatctcaggggaaaaggcgatccgaccctattggcttctgattttgagaagatggctaaacaggtcaaagccagaggcatccatgtcattaaaggagatctggtcggggatgattcgtggtatgacgataccaggtattcagttgatcttccgtggagtgatgaaggccaatattatggcgcgcaagtatcagctcttaccgcttccccaaatgaggattatgataccggaacggtgattgcggaaatcagcccggcgaaacagcccgataaaaagccgcgcatttcaatttctccctatacggacatcgttcgtgtgaaaaatgaagtaaaaaccgtcgcttctgatgaaaagaaagaattgacggttgaacgggagcacggtggcaatgtgattacgataaagggagccatacctgccggctcggcaaaggcaagagaatgggcggcagtgtgggatccgtcgtcctatgctttagatttatggaaacaagcgcttactaaacagggtgtaactgtaaaagggaaaatcagaacaggccgaatgccgcaccgcacccagcttgtcacatcacggacatccatgcctctttcagaattattgatcccgtttatgaaactgagcaacaacgggcacgccgaaattctgatcaaggaaatgggaaaagtgaaaaaaggggagggcagctgggaaaagggcttggacgtgatgaaatcggagctcaaatcgttcgggctcaatccggatgaattgattgcaagagacggatccggcgtttctcatattaacggcgtatccgccggccaaatcggagagcttttgtatgcggttcagaaagagaagtggtacccggctttccttcgttcgctccctgtcgccggtgcaagcgacagaatgacgggaggcactcttcggaaccggctgaagaatactccggcagagggcaaaattaaagcaaaaaccgggtcactaacatcagtcagttcgattgccggctatgcagacacaaaaacaggagatacgcttattttttccgtgcttcaaaacgggctgcttgacgaagatgacggaaaagacattgaagacaaaatcgcagtcgtgctggcaaatcaataagaagggccggatccttagagggttcggcttttttgatgtctgtaaaacattatattgcgattatgaatcaatcttttcaaaaagtaatatcggcaacattcttccttttttttacatgatactttcttacttgttcactgatttttcattttttatcataaaatttcttttcggaaagcaaaacctttttaaaagcgcaattaattatacattttattccttattatagtgttttagaaccagtttgcagtgtacatacatactgttttacatggtataaaaattatagaaatgaagaagtgaagtgaggaatatatactatattctaaaaaatgttagaaaaaatttaattttttattgtgatttctaaaatatgttttaaaataatgcttatatggatgatttagtcatatgctgtcgaaatttaattgtaattatttcactttcttatcctcttaaattgaaatggagggattccattgaagaacactgtttattctttaactcacgcccaaagaagagtctggtttacagagctgctcgagccgggcacaagtatctgcaatcttgcggcgtgcgtcaaattcagggggaatatcgactttgacgtattgcgccgtgctttagatttctctatcttgcaaaatgattcgctcaggtttcaactgacggaaggggacggctcagaaccccagctgtatctggccgggcatcggccgatttctttagagaccgttgattttactcatattgatcaatcagagcgggatgcatggattgacaaacagacgcgtgttccgttcaagctgtttcattcaccgctgtatcattttactctgcttgtcatgtcagacgaagaagtttggctttattcaaaatttcaccatattattatggacggcatctcgctcaatctgcttggcaatcagctcattgaaatctaccaaaaaatcatgcgaagcgaggatttggccgaacaccaaagcccttcctatctcagctacatggaaaaagaacagcaatacctacagtcttcccgttttcaaaaagaccgttcattttggactgaaacataccgaaccgttccggaacacctttcactggcggaacgaacctctcatcttagacaaagcactgcagcttcaagagatacaatcactctttcccactccttagaacaatcaatccggcgtttttgcaaagatcataatgtcagcatcatctctctgtttatggcttcgttatacatatgcatcagccgtctgacggctaaaaaggatattgccatcggtacttattacggaaaccgcggttccaagctcgaaaaggatatgctcggcatgttcgtcagcacgctaccgatcagaatgacggcagatccggatgcggagttcgtgtcttttgtccgcagtgtaggaaaacagcagctgtctgttatgcggcaccagaaatatccttacaatctttttgtcaatgaattaaggcagattcatcacgacctgcaaaatatcatcgggatttcgatgcaataccagcctctcgcgtggcgtcaggcagaaggtttcgattatgaaacggcgatgtttttcagcgggcatacggcaaatgagctgtccattttaattaaggagcggacagatacgggattgattgagctgaattttgattatcaatccgctttatttactaaaacatcgattaaacgaattcaaactcatttgctgacgatcgttgaaaatgccgttagaaatccaaaccggctgattcggcatattgatatggcggatgaaaaagaaaagaaacgggtgttaactgcgtttaaccatacagaaacggctgaaccgccggccccgacgcttcacgggctgtttgcccgccgcgccgcgctttcgccgcatcgtccggcgctccgttttccgggcggtatgctgacgtacgctgagcttgaccagtacacagacaggctcgccgttcggctccgccaaaaaggcatccgcaaagaaagcatggtcggcgtactcgctgaacgctcgccggagatggcggtttcagtgcttgccgtgttaaaagcgggcggcgcctacgtgccgcttgacccggagtatcctgaggacaggctgcgatatatgcttgaggacagcggcgcttgtctcctgcttgcacagccggggttatccgtttccggtttttccggtgaaacgctagaagtgtctctttcttctctgacaaatgagacggagacaggggctgtctctgaagaagcggatgctgattcgctcgcttatatcatttatacgtccggttcgacgggaacaccgaagggagtggctgttgaacaccgtcaagccgccgcctttttatcagggatgcaagggcagtttccgttaacggaagaggatattatcgtgctgaaatcatccttttcattcgacgcctccatctggcaattgttttggtggacgatgtccggcgcctccgtgtatctgcttccggccggctgggagaaagatcctgtgcggatgattgaagcgtttgcctcagaaaaggtgacgaccgcgcattttattccggcgatggtcaacagctttttagacgcgctggaaacagagcctgcggaaacaagaacacgcctcggcagaacactgacacgcgtgttcgccggaggggaagctctttccccgcttacggctgcccggtttgccgatcttctgccggagaccatgcttattcacggctatggaccgacggaagcgacggttgatgcggcgttttacgtctgtgaccgaaaacgggacagcggacggacaaggcttccgatcggaaaacccgttccgggtgcccgtctgtatgtattagatagcggaggaaccatccagcctgcgggcgtggcaggagagctgtacatcgcggggaccggcgtggcccggggctatctgaaccgccctgagctgacggaggagcgctttgtcgttgatccgttttatccgggagaacgcatgtatcagacgggcgatatcgcacgctggacagaagacggccttgtcgaatggctcggtcgttcagacggacaggtgaaagtccgcggctaccggattgaaccgggggaaatcgaagcggcgatccggcacatcgacggcattcgtgaggcggcggtcaccgcccggaccgaacacggcgaaaccgcgctttacgcctatattgaaggacgaaaaagcgatgacgtgcgggcggagcttgcgacacgccttccggcctacatgatgccggctcagtttatagagatgagcgaatggccggtcacgccaagcggaaagcttgaccgccgcgcgctgccggctcccggcggatcggcagacagacaggcgtacactgccccgcggaacgtcacggaaatgaagctttgcgccctttgggaagaggtgctgaaaaacggccccgtcggcatccgggatcacttttttgagcggggcggccattcgttaaaagcgacggctctcgtctcccgcatcgccaaagagttcggtgttcaggtgccgttacaggacatcttcgcccggccgacggtggaagagctcgcttcggttattcaggacttggaagaaagctcgtatgaagcgattcagcctgcgcaaacacaagatacctacccggtgtcttcagcgcagaaacggatgtatgtgctccaacagcttgaagacggcggtgtcggctacaatatgccggctgtgctggaactgacgggcccgcttgaccgtgtccggctggaggagacgttccggcagcttgtggagcggcacgagtcgctcagaacgtcctttgaaacggggcctgacggcgaaccggtgcagcgcatccatgacagcgtgccgtttcagctcgatgaggccgagtcagctgacgcattcgtccggccgttttgtctggaggaagcgccgctcttccgtgcggccctcgtgaaagaatcggaagaacaccatcttttattaacggatatgcatcatattatttctgacggtgtgtccgtcaacaccttgataaaagaattcggcgagctgtacgcaggccgttcgcttgcgccgatgcgccttcaatataaagactatgccgtctggcagcggtcgtttcaggagaaagaaggatatcagaagcaggaagcctattggctgaagcggcttgaaggagagcttccggtgcttgaacttccggctgacaagccccgtccggcggtcagaagctttgcgggcggcagcgtatcgtgcacgcttgacgctgacacggcatccggccttcaccgcatcgcccgggatcacggctccactttgtatatggtgcttctcgccgcgtacaatacgctgctcgcgcgattgagcgggcaggaagacatcatcgtcggatcgccgattgccgggcgcccgcacaaagaccttgaaccgattctcgggatgttcgtcaacacgcttgccatcagaacggagccgaagggggacaaacggttcaccgattatttggcggaagtccgccaggcggcgcttgaggcgtatgaacatcaggactacccgtttgaagagcttgtggagcggctcggcgtgcagcgggacatgagccgcaatccgctgtttgatgtgatgtttattcttcagaatatggagcgggaggagataaatctggccggtctgaaggcgtcacgatcaaagcataccgaacatgatgtatcaagttttgacctgaccttatcagcggctgaatccgatggaaacatccgctttgagatggaattcagcaccgagctttttatgaaagaaacgattgaacgctggatgggccacttactgaatctcttgcgccatgttgccgccgaaccggaagtcacactatcgaaagctgacattttggatgaagaagaaaaacaaaagttactgattgagtttaataacacacaaaccgaattcatggaaaaacacaaactgtttcaccagctgtttgaagagaaagcagaagaaacgcctcatcagaccgctgttattgaaggagcacaacagatcagctatttccagctcaatgagcgggcaaaccgtcttgcccgaacactgcagaaaaatggattcggtccgggaaaaagagcagccatattagcaaaccgttcgattgaagcgatcgtcagtgttcttgcggtcatgaaatcaggaggagcgtatataccggttgactcccattatcctgaggaacggattcgctatttattaaaagacagcgcggcatccgtcttgatggtgcagtcagaatacaaagaacttgcttcacagctgacggatcacaatttatttctcattcagcttgatcatgaagatcaatacgatatttccgcaaagaatattcagccgacagcgtcaccggatgataccgcatatatcatatatacttcgggaacaacgggaacgccgaagggagtcgaagtcagaaatcgcagctttacgcatgcagcacttgcatggcgcaggatttatgagcttgatcttataccggtcagagtgctgcagatggcgagtttctcatttgatgtattttcaggggatctagcacgcgccctgctaaacgggggaacgcttgtcatttgtccggatgacgtccggcttgagccgcagcagctttatcggctcattgatcagcaccgtatcacgtttatggagtcgacacccgcgctgattgttccgtttatggaatatatataccgccggaaactcgcgctgcaaagcgtaaaaatactggtacttggttcagatatgatcaagtcgcaagatttttatacgcttcatgaacgctttgggaaagaaatgcggatcattaacagctacggtgtaacagaagcgacaattgactcttcgtattatgaagccgaaatgagcgaagagccgcgggaagatgatgtgccgatcggtgttccgcttccgaatgtgcaaatgtacgtcttaaacaaagacaaacaggtccagccgatcggcgttttcggagagctgtatatcggaggcgccggcgtcgccaaaggatattggggacagcctgagctgacagaggacgcattcagtgacccgttacaaacgggagaaacgctttacagaaccggagatcaggcttgctggctgccggatggaactcttcgttttaaagggcggatcgataagcaggtgaagatcagaggctacagaattgagacgggagaaatagaaagtgtgcttttgaaacacgatcaagtcaaagaagcggctgttaccgtgatgaaagatgccgaaggacaagcacgattagcggcatacgtcgttcctaaagaggccgatatctcatcactccgccagtctcttatgcaggagctcccggcttatatgatgccgtctcatattatcggtttagacagcatgccccttacactgaacggcaaacttgataaatcggcattgccggcagaagagatacattcatcacaggcatttgtcgcgcccggcgatgaaaaacaggcgatgttatgccggatttgggaagatgtgcttcatattcagaaagcgggaattcatcactctttctttgagcttgggggagattccattaaggcgcttcaagtgtcagcccgactcgccggagaaggctggaacatgtcgatccgcgatttgtttcagttcccgacgattgcagaactcgcgaagcacctcacgccggctgttgcaacggctgatcagggcccgatagaaggaagcgctccgctgacaccgatccagcagagattttttgaggagccgggtgcgtttgagcttcattataaccaatcagtcatgctgtgcagtgaagacagcctcgaaatagatgcgctgtatcaggcggtttgcgcgctgacagaacatcatgatgcgctgcgaatgactttcactgaaaatgagcatggggaagttgttcaatataaccgcggaatcacagagcagcatgaagaaatctttacgcttaacgtcatagatctttcagaagaaacacagccggaaaaacggatagccgctgaggaaaaagaaatacagcaggctatgcgccttgatcaaggccctctgcttcatctcggagtgttcaggctgaaagaagccgaccatctgctcatcacgattcatcaccttatcacggacggcgtgtcgtggagaatattgcttgaagatctgcagacagcatatcagcaggcattggacggcaaacaaatcgaactgccgccgaaaagcgattcttatataaagtatgccgaagagctttttgacatttccaagagcaaagcattgctggaggaagccgcatactgggacagcgtgatgtctggtgaaacagcgccgctgccgaaaataactgatgaaaacgccggacgattgcaggaaaacgcgcgcactgcatcatggatattaagcagcgaagtcacgaagcagctgctgatggaaacacagcaggcgtacggaacggatgttcatgaattgcttttaacggcgcttggaatgacgcttcatgagtggacgggttccgaacagatccttatcagcactgaaggacacggacgccaggggcatattcctgacattgatatgtcaagaacggcgggctggtttacatctgtttacccggtgcttttggatatgagagtgccggacggctcaggggaaacaaccgcgcaccgcataaagacggtaaaagacatgatgagacgggttcctcatcacggaaccggctacgggctgctgagatattcgcgaaacattctttataaagacccagaaataagctttaactatctcggtgcgtttgacggtcttgaggggacgctgaagatgtcaccgttcaagccgcagcatgatatagcggccgggcgcatccgcgagtttgatctggatattaacgcgatggtggcggccgggcaactggaggtaaaagccgtttataccgatgtatttgcaccgggggcaatcgagttcttcatgaatcgtttccatactcacctcggggacatcatcgcccactgttccggcaagaaagagcgggaaaaaacattaacggattacagccatacagaattgaccgctcaagccctatcaagcattgaagatctcgtaaaaggactttaatttcataaaaaggtgtgtggcattcgtgacacaagcgacagaaattcaagatatttaccctttatcatatatgcaggaaggcatgctgtttcattcgcttctggattccggatcaaacgcatatgttgagcagatttcgtttacagtcagcggggatttatgcattgatacattccaaaaaagtctggatatgcttgtcagccgttatgatattttcagaacgattttcataaaagaagtgcctgaccttgaagggccgcagcaggttgtcctttcacgccgtgacactgccgtacggactgaagacatttcagattattcggaagaacggcagcaaagcatcattgacaaattcaaggaaaccgaccggcataaggggtttgatctgcaaaaaggccccttaatgcgcctgactctttttcaaacgggagaaaaccgccatacgtgcgtttggactcatcatcacattatgatggacggctggagcttgggccttgtactgaaagatttcttcagcatgtattatgcgatccggagcgggcggcctgtaaacctcggcagtccggctccttacagcacttatatcaaatggctccgaagccggaataaagaagaaacgtcagcattctggtcgcgctgcttggaagattacggagaaaccgtttccgttccgcaaacgaagaataagacggcgcaaaacggttatgcatctgagcatttccaattttcccttgagcctgaaaccgtacaaaaactgacagacattgcccgaggcatcggggtcacgctgaatactatatttacgggcatttggggtctgcttctccatcgttacaacgggactgaagatgccgtcttcggttcggttgtttccggcaggccttcagctatcagcggcattgaatccatggccggactgtttatcaataccgtgccggtaagggtgcgcgcggctggtgatatgactttttcttctcttctcaaaaaggtgcaaaaagagtcactcgctgcggaagagcacagctattatccgctttatgacattcaaaacgagagcggcctgcaaaaagatctcttgaatcacatcctggtttttgaaaattatccggttcagatgcaggctgcggtaaacggctggcagcaaacggaaagccatgcgctctcacttgaaaacttttcgatggcggaggaaaccaattacgatcttaacgtcgtcatcgttccgggagaagagttttatgtgaaattcagctacaatgcgggcatctacgatcgggaagacatgaaacggatcaaagggcatattctagaggtcatctcctgtgtaacggaagatccggacaggcttttatcaagcatcagtctcgtaccaccggaggaagaagccctgattcattcgtttaacgaaacgaaccgtccgtaccctgagacaaccgttcatgggctgtttgaagaacaggcggcaaaaacgcctgaccaagaggcgttgagatataacggggtaagctggagctacaagaaattaaatcagcgggcaaatcagattgcccatgcgttaagggaaaaaggcgcccgttcagatcagatcaccgctgttatgctgcgccgatcaatgagtacggttgccgctctgctcggaatttggaagtcgggcagcgcctatatgccgattgatgcggaatttccgcctgaacggatttcatttttactgagagacagtgaagcctcactgctcctgactgaaaaagacctgctccccctcattccgccgcatttcaaggggagcgtcgtcatcatggaggaaacggtttcccagcagactgcaccgcttccgccggtgtctgacagcggaaattgggcgtatgtcatttacacttccggaacgacaggccggccgaaaggggtgcttgtacaacacaaagcgatcagcaatacattgcaatggcggcgtgaagaatacgggatgacagaaggagacatagcgcttcatcttttttcatacgtatttgacgggtcattaacgagtcttttcactccgcttctgtcgggcgcctgtgtactgttaactgatgaagatgatgcgaaagacgtcctttcaataaaacagaaaatcgcccgccacggggtaagccatcttctgatcgttccgtctctgtatcgcgttctgcttgattcgctgacgaaaaaggatgcgcagacgcttcgggcggtgacatttgccggggaagcggccactcctgatatcgtggaagcgagccgcaacatatgcccgaatgccgagctgctgaatgaatacggcccgacggaaaacagtgtggccacgacgattctgcgcaacctgcaaaaaagcagccggattacgatcgggcgcccgattgccaacacttctgtctatatgatgcacggagatcggctgcaaccggtcggagccgtcggtgaactgtgtatttccggaaaaggtctggcggacggatattttcagcaaaaagagctgacggacaaagtctttacccctcatccgtttcgtaaaggtgaacggctgtacagaacgggagatgcagcccgatttttaccggacggaacgattgaatatatgggacgctttgacgatcaggtgaaggtaagaggttacagaattgaattaggagaaatcgaaacggcactcagaagtctgtccggggtaaaagaggcggcagtcatcgtgcgcaaaacggcggacggggaacaggagcttgcagcttatgccgtactggaaaacgcgggtgtgacatttgatcctcatgccgaattggccgggagattacctgcttatatgatcccgggaagctttaccaaattgacggaaatgccgctgtctgtgagcggaaaacttgaccgggccgcacttcctgagccgaaagaagccgagagaaccggtgattatcaagctccgcgcacaatgcttgagactgagctgctgtctatttggcaagaagtgctgaaacgggaacacatcagtatgagagatgatttcttccaaatcggcggacagtcgctgaaagccgcgtcgcttgtttcaaagatacataaacggctgcaaattgaacttgccgtccgccatgtttttgaacatccgaccatcgagagcatggcccgcttcctagaacagaggaaaagaggagaatatgcagaaatcacgcctgcggaggcaaaggacttgtacccgctatcttttgcgcaaaaaaggctttatgcccttcatcagcttgcggcggacagtacgggctatcatatgcccgcttgtctggaactgagcggcagactcaaccgtgatcgtctgcacgaagccttttcagcgctgttacaaaggcatgaagcgttacggacatcatttgttttacgaaacggggagccgatgcagcacgtacattcacatgtcgatctcgatctcacagagattcacatgccatccgggacacttcttcaagaggcgatggaaactttcgtcaaaccgtttgacgtggaaaaagcgccgcttttgagagtgactttagccaaagccactgaagaacgtcattttctgctgcttgatatgcatcatcttattgcagacggtgtgtcaatgagcgttctgatccaagaattgacggatttgtacagaggaaaagagctgcggccgttaaaacttcagtacaaagatttttccgtctggcagcatgagcggttcgccgctgaagaattcaaaagacatgagcggtattggctggatgcgatcggggaaaatattccccttcttgatctgccgctcgataaaaagcgcccgcagcttcctgatttcagcgggtccgttgttcgaacgcgcctacaaaaagaaacggcggagaatttgcgccggctcatggatgagacgggttcgacactgtatatgattcttttggcaggctactccttgttcctttctaaattgagcgggcaggaggacattgtcgtcggttcacctgcggccggcagaagccgcgctgagcttgatggggtcatcggcatgtttgtaaataccgtggcaatgagaagcaggccgaaaggggataaaacattccgcgcttatttagaagaggtgaaaatgctcgccctcggcgcagccgaacatcaggacttcccgtttgaagaacttgcccaaaagcttgatacacaccgggaagtcaatcgcaatccgctgtttgatgccatgctcgttttgcaaaacagtgatgatttcaaagtgaaccttccgggcttatccgtttcttcacatgcagtgaaacatgacatttcaaaattcgacttgacgcttcatgccgaggaacggccggacggctcactggattttcattttgaatacagtaccgcgttgtttgaaaaaggtacgatcgaacggtgggccggtcattttaaagagcttttaggacaaatcgcatcggatgatgagcggaagctgtctgacattcatttgctggacacaaatgagcggcagatgcttcttcaagcggaaaatcaaacagctgagtatccgaggcatgagacgatcgtcagtttatttgaggcacaggcggaaaaaatgccggatcaaattgcagccgttatgtccgatgagcgtctcacctaccgcgagctcaatgaaaaggcggatcgaatcgccgatatgctgtcggaaaacggcatccgctccggacagattgtcggaattatgaccgaacgatctcctgaaatgctgatcgggattttcggtattttaaaagcgggaggagcttatctgccgattgatcctgactatcctgacgagcggatttcatttatgctgactgacagcggcgcgcgtgttctgttgacgcaatcgggtcttgggatatccggaatggacgggctgccggttttatacatcgataagcctgaatccgtttcagcagacagaacgaaagaaatgataacgcctgaacagccggcttacgtgatttacacatcgggcacaaccggaaaaccgaaaggcgttatgacggagcaccgcaatgtcatcagccttatcacacataaaggactgccgtttgatttcggcactggagacgtctggaccctgttccactcctattgctttgatttttctgtctgggaaatattcggcgcgctcttatacggcggaaaggtagttatcgtgccgaaagaaactgcccgtgatccgcatttgtaccggcagctgctgcaaagtgaaggcgtaacggtgctgaaccaaacgccgacggctttttccggactcattcatgaagaagccgggcatgcggacaagctgaagcttcgatatgtcattttcggcggagaagcgctccagcccggcatgctgaaaagctggaaagagaagtacccggagacagagcttgttaatatgtacggcattacggaaaccacggttcacgtcacatgcaaaaaactgaatatggatgatattgagagaaataaaagcaatatcggcagaccgctggaaaccctccatgcttttgtcatggacgcctatatgaatccgcagccgatcggaattccaggtgagctttatatcggcggggaaggcgtcgcgaggggatatgtaaacagggatgatttaaccgcctcccggttcatcacgaatccgcacattaccggcatgcggctctaccggacgggcgatattgccaaaagactctcaaatggcgagctggaatatgtcgggcggaaagatgcgcaagtaaaagtcagaggccacagaattgagctgggagaaataaaatcagcgctgcaggagctttccttcgtgaaagaggccgccgtgatcacacgtgctgatcagcacggtcagcactccatttacgcatacgcggtcttacacgggaatgaaaaaataaaagaagcagaggttcaggcctctctcagagcttttctgccggaatatatgattcccgcccgcttgatagagcttgatgaactgcctttgacggcgaatgggaagctggacgagaaggcgctcccgcagcctgaattaaatgaaagccttggagatgatatcagcctgagaaatgaaactgaagaaatgatggctgacatctgggaagaactcttaggtgttgaaggactcggccccaatgctcatttcttccatctcggcggggattcgattaaagcgctgcaagtatgtgcgaggctgaaacagcagggctatgaaacgaccgtccgcgagctgttcgagcatcagacactgggagaagtctcgatgcggctccggaaagtccgccgcgtgattgatcaggctcccgtcacgggagacgtgccgctgacgccgatccagcactggttcttttcgcaatcattgccgcatgatcattttaatcagtccgttatgctcagcagtgcggacaggatcaatgaatctgctatgagaaaagcgctggcacagctcgcggttcatcatgacgcattacggatggtatgcggcacgcaaaacggatcagtgattcaatataacagagcggataacctttctgaagaagaactctttacatttgaaacgcatgacgtgagagggaaagggttattacaagaggaacacgccgcaattgaacaggcggccgcccgcattcaaacttccattcggctggagacgggtccgctcgtagctgtcggtttatttcacgctaatgatggcgatcatctgctgctttccattcatcaccttgtcattgacggagtgtcatggcggattttatttgaagatctcaccgcgtgctacaggcaggcgctcgaaggaaaagaagccgcgcttccggcaaaaaccgattcctatcagacttacgcgaagcaaatctctgattatgcaaaaagccgccggctgttacaggaagcagactactggtccgaaagagaaaaagcggcggtcaaaccgcttccgaaagatgcccgcatctcttccaatcttctgaaagatacagatgtgatgaccgttacattgacaaaacaggagaccgagcagctgttaacggaagcgaacagagcatacacaacagagacgggcgaattattgcttgccgcgttaagcctagcgctgaacagatggaccggaaacgagacattcaaaatcagcatggaaggccacggaagggaagagcacctggagcatcttgatatcagcagaaccatcggctggtttacgtcaatttatccggtattggttgacgcaagttttcaagatcagcctgatgacggcgagcgtctcggctatcacattaagcggacaaaagacatgatgcgccgcataccgcataaaggagcgggatacggggtgctgaaatatataagcaaactctggggagagactgaatctgattctcctgaaatcagttttaactatctgggacagtttgaccgggaaatccgttccagcggcttcggtgtttctcccgtaaaagcgggaaatgaagtcagcccagactgggaacgtccgtacacacttgatatcagcggctccgtatcgtcggaatgtctcagcatgcatgtcgtgtacaaccgttttcagtatcaaaaagaaacgattgaagttttgacgggatattttcatacctttctcaagcagattatcacgcattgcacaggcaaagaggagcgtgaatggagcgccgctgatttcagtgacgaggagttaacgctggaagatctgagtgacattatgggagccgtcaacaaactatagaaaaggagtggcgcaatggggcagcaaccggaaatacaagatatatatcctttgtcttttatgcaggagggcatgctttttcattctctgttggatcatgactcaagagcctacttcgaacaagcggtgtttacgatcagcggacagcttgaccgggaacggttccaaaaaagtatagacactgtttttgaacgatacgatattttccgtacgacatttattcacaagaatgtggcaaagccccgccaagtcgtgttgaaaaacaggccgagccgcgttcagtttcatgatatttctcatttggacgagaaggcacaagacaaatatgccgaccggtttagaaaagaagataaagataaaggctttgatttgcaatcagaccctctcatgagagtctccattttgaaaaaagcgcctgaacgctatgtttgtatatggagccatcatcatattgtcatggatggctggtgcttcggaattgtcatgaaggaatttctgatgatctatcaatctctcggagacgaacggcttccgttcctcgagcccgttcagccatatgggaagtatattaaatggctcatgaagcaggatcgtaaagaagccgagattttttggaaaacgagacttgccgatcttgagcaaacggcgtctcttccgaaaaaatccgcggaaccaaacggcgaacttgagcaggcggttttcaccatttctgaagagcagacaaatgagctgaagaacattgcggcaagggcgggagcaacgctgaatacagtgttccaggcactgtggggcattttgctgcagcgtgtcagccgctgtgatgatgccgttttcggttctgtcgtttccggccggccgtcggatctcgcaggcgtggaaaaaatggtgggactgtttatcaatacgattcccgtacgggtgaaaagcggttcattttcttttctggagcttgtcaggcatttgcagcaggagacgctgcaagcagaagcgtacagctattatccgctgtatgacattcaggcgcaaagccctctgaagcaagcgctgtttgaccacattatcgtgtttgaaaatgtgccggcccagcgtgaaattgaaaatgtgagtcaggccggttcatttgattttgcggtagaggattttacgatggaagaagtcacaaactacggatgcagcataaaggtgattccgggcaattctctttatatccgcttaaaatttgataccggtatatacgacgatgtttttatgaagaatatcgaaacatttttacggcatatggtgaactcagtcatttccgaccctgaaatcggcgcttccgagatcgcattgctggatgcgtgtgaagccagaagtatgatggatgcatttaaccatacagaagcggttgaaccgccggctccgacgcttcacgggctgtttgcccgccgcgccgcgctttcgccgcatcgtccggcgctccgttttccgggcggtatgctgacgtacgctgagcttgaccagtacacggacaggctcgccgtccggctccgacaaaaaggcgtccgcaaagaaagcatggtcggcgtactcgctgaacgctcgccggagatggcggtttcagtgcttgccgtgttaaaagcgggcggcgcctacgtgccgcttgacccggagtatcctgaggacaggctgcgatatatgcttgaggacagcggcgcttgtctcctgcttgcacagccggggttatccgtttccggtttttccggtgaaacgctagaagtgtctctttcttctctgacaaatgagacggagacaggggctgtctctgaagaagcggatgctgattcgctcgcttatatcatttatacgtccggttcgacgggaacaccgaagggagtggctgttgaacaccgtcaagccgccgcctttttatcagggatgcaagggcagtttccgttaacggaagaggatattatcgtgctgaaatcatccttttcattcgacgcctccatctggcaattgttttggtggacgatgtccggcgcctccgtgtatctgcttccggccggctgggagaaagatcctgtgcggatgattgaagcgtttgcctcagaaaaggtgacgaccgcgcattttattccggcgatggtcaacagctttttagacgcgctggaaacagagcctgcggaaacaagaacacgcctcggcagaacactgacacgcgtgttcgccggaggggaagctctttccccgcttacggctgcccggtttgccgatcttctgccggagaccatgcttattcacggctatggaccgacggaagcgacggttgatgcggcgttttacgtctgtgaccgaaaacgggacagcggacggacaaggcttccgatcggaaaacccgttccgggtgcccgtctgtatgtattagatagcggaggaaccatccagcctgcgggcgtggcaggagagctgtacatcgcggggaccggcgtggcccggggctatctgaaccgccctgagctgacggaggagcgctttgtcgttgatccgttttatccgggagaacgcatgtatcagacgggcgatatcgcacgctggacagaagacggccttgtcgaatggctcggtcgttcagacggacaggtgaaagtccgcggctaccggattgaaccgggggaaatcgaagcggcgatccggcacatcgacggcattcgtgaggcggcggtcaccgcccggaccgaacacggcgaaaccgcgctttacgcctatattgaaggacgaaaaagcgatgacgtgcgggcggagcttgcgacacgccttccggcctacatgatgccggctcagtttatagagatgagcgaatggccggtcacgccaagcggaaagcttgaccgccgcgcgctgccggctcccggcggatcggcagacagacaggcgtacactgccccgcggaacgtcacggaaatgaagctttgcgccctttgggaagaggtgctgaaaaacggccccgtcggcatccgggatcacttttttgagcggggcggccattcgttaaaagcgacggctctcgtctcccgcatcgccaaagagttcggtgttcaggtgccgttacaggacatcttcgcccggccgacggtggaagagctcgcttcggttattcaggacttggaagaaagctcgtatgaagcgattcagcctgcgcaaacacaagatacctacccggtgtcttcagcgcagaaacggatgtatgtgctccaacagcttgaagacggcggtgtcggctacaatatgccggctgtgctggaactgacgggcccgcttgaccgtgtccggctggaggagacgttccggcagcttgtggagcggcacgagtcgctcagaacgtcctttgaaacggggcctgacggcgaaccggtgcagcgcatccatgacagcgtgccgtttcagctcgatgaggccgagtcagctgacgcattcgtccggccgttttgtctggaggaagcgccgctcttccgtgcggccctcgtgaaagaatcggaagaacaccatcttttattaacggatatgcatcatattatttctgacggtgtgtccgtcaacaccttgataaaagaattcggcgagctgtacgcaggccgttcgcttgcgccgatgcgccttcaatataaagactatgccgtctggcagcggtcgtttcaggagaaagaaggatatcagaagcaggaagcctattggctgaagcggcttgaaggagagcttccggtgcttgaacttccggctgacaagccccgtccggcggtcagaagctttgcgggcggcagcgtatcgtgcacgcttgacgctgacacggcatccggccttcaccgcatcgcccgggatcacggctccactttgtatatggtgcttctcgccgcgtacaatacgctgctcgcgcgattgagcgggcaggaagacatcatcgtcggatcgccgattgccgggcgcccgcacaaagaccttgaaccgattctcggggtgttcgtcaacacgctggccatcagaacggagccgaaaggagacaaacggcttaccgattatttggcggaagtccgccaggcggcgcttgaggcgtatgaacatcaggactacccgtttgaagagcttgtggagcggctcggcgtgcagcgggacatgagccgtaatccgctgtttgacgtgatgtttgtgctccaaaatatggagcgtgaatccctgaatttaaatgagctgcatttgactcaagccgcggatgcaggtcataaaaccgcaaagtttgatgccacgctttacgcggcagaagggtctgacggttccatcagctttgattttgaattcaatacagatatctatcaaaaacagacaatcgaaaaatggctttcttattttacccgtattcttacaaaagtaattgaagaccaaacaataccgcttggtgacattcacgtactggatgatgctgaaacaaatcgcgttatttatcagtttaatcagacgaaaagcgattacccaagacacgaaaccatcagccgtttatttgagcggcaggctgaagaaacccccgatgcccgggcagttgtatatgatggacaaatcttgacataccgtgagctgaacgaacgggctaatagaatagcggcggctctccgatcaaatggcgtcggtccggaaagtgttgtcgccttattaaccggacgtacaacagagcttgcttccggaatcctcggaatattaaaagcgggaggcgcctacttgcctatcggtgacgatgtgcctcgggaacgggctgaatggatgcttaaagactgtaaagctgatattcttctccaatctgataaacttgacggtctgccgctttccggaaaacgtttattcatagaggatattcaaacaaaggccggcttaagttcggaaaatcccgaaccgctcggcggacctgaatcattggcctacatgatttatacatccgggtcaacaggtgcgccaaaaggcgtcatgattgaacagcgaagtgtgatccgtcttgtgaaaaacagcaattatattgattttacgccgaaagacagactgttgtttacttcatcattaggatttgatgtaacgacatttgaaatattcggtccgcttttaaacggtgcttctttatatgtaagtgaccaggaaacctatctcgactctgatgttctggaaacatttatacagcaaaacggcattacgacactgtggctgacatcgtctttgttcaatcatctatcagaacaaaatgaacacgtgttttccggattatcccgattgattatcggcggggaagcactgtccccaagtcatgtaaaccgggttcggaaaacgctgccgcatctttcaatatggaatggatacggaccgactgaaaacacgacgttctcgacttgctttttgattgaacaatcatacgatcattcaatcccgatcggccgccctgtcggaaattcaactgcatatatcataaacagcaggggaacaccgcagccgatcggcgtcatcggtgaattatgcacaggcggagacggtgtggcaagaggatatttcggccgccctgagctgacggaagaaaaatttgtccctaatccttttgttcccggagaacggatgtaccgcaccggggatttagcccgctggctgccggacggaacgattgaatatgccggacggatggatgatcaagtgaaaatccgcggttatcgggtcgagctgggagagattgaagccgcactaaggagcctggacggcgtgaaagaagctgccgtgtcagtcagaaccgggcagtccggcaataaagaactgatcgcatatatgagtctgcaggcggacatggatacagaaaaagtgcgttcttcactttctaagcaactgccgaattacatggtcccggcctatatgatggaacttgagaagctgccgcttacgccgaacggtaaattggatcggaaaaatctgcccgaaccggagctcgcgcttcaaaccgcgtacacagctccccgcaatgagcttgaagaacagctttccgtgatctggcaggaagtgctcggcacaaaacaagtcgggattgaggattcattttttgagttgggcggcgattcaatcaaagcgctccaagttgccgcacggctcggacgctatgggtggaaaatgacggcaagtgacttattccggcatccgtccattaaggaactcgcgcctcttatccggaaagcggaaagagtcatcgatcagcaaccggtggaaggagacataccttggacacccgttcagcactggtttttatcacagcggatggaaaacagaaatcatttcaatcagtccgtcatgatgttcagctctgacgcattgcataaacagccgctcaaacaagccttggagcatcttgtcattcatcatgatgcactccggatcaccgtcagtgcagaaaacgaaagtatcagacaaatcaatcacggtattcaaaaagatgaactgtacagcttggacatttgggatctgtctgagacagatacttgggaaagagaaatagaagatgaagtggctgcgctccaacagcggatggatattgaaaaaggaccgttattaaaagccggctggttcaaaacccggtcaggggattatttattcatcaccgtacatcacctggcggttgacggagtgtcatggcgtattctgctggaggatttatctgccgcttacacacaagccgtaaaaggtcagccggtccagcttccgccaaagaccgattcgtttaagcaatacgccgtaaggctttcagaatacgcaaaaagcagcaagctgatgcgtgaagaagaatattggcgttttattgaagaagaaacagccgccggacttccttatgaaaaaccgcagtatcagacgggagccgacagcattcggcaaacggtaagctttacgcttacagaagaagaaacgtccgttttgcttcagcaggtcaaccgggcctaccataccgatacgcaagatgttcttctgactgccgcagctttggctttacgggactggacagggggcggcagactgcgcatcgcgatggaagggcacgggagagagcacatcatgccggagctcgacatcagccgcaccgtaggctggtttacctccatgtacccggtgctcattgacttgaacacagcaggcgctgagcttggaacggctgtaaaaacggtcaaagacacactcggaagaataccggataaaggaataggctacggcattttaaaatacatgacaccgcctgaacaaaaaacaatccgcttcagacaagcgcctgaaatcagttttaactatttagggcaattcaatgatacagaagatcagcccacattcagtttatccggtcttgcgagcgggcacgacatcacgccgacatggcagcgggaacaagcggtggaaatgagcgcgatggccgctcaacataaactgcacttcagtttgagctatccgccgagccgcttccgcaaagaaacgatggaacagctgctgcaaaccttacagcaatatttgcgtgatattatggcgcactgcacaggcaaagaggaagcagaaaaaaccgttagtgattttagcagcaaaacgttaacatctgatgatttggacagcatagcgagttttgtcgaggaactgtagaaaaaggcgacggggagattataacatgacaaaaaagaatgcaattcaggatatttatccgctgtcttatatgcaggaaggaatgctttttcattccctcctgcaaaaggaatcacaggcttacgccgagcaggcctccttttcaataacggggaaggttgacacccgcgtgtttgaagagagcgttcatgcccttttcgaaagacatgatattttcagaacgatctttatcagccagaacgtgtcagtgccgcagcaggtcgtattaaaagagcggaacgtcagcatcattgaggaaaatctcaccaatttaaacaaggctgatcaaatcaagcatattgaagaagccaaacgaagagaccgaaagaaaggatttcacctgcaaaaagacatgctgatgcgggtgacgctgcttcaaaccggtgaatgtgaatatacgtgcatatggagttttcatcacattattatggatggctggtgtctcggaatcgtgctgaaagagttcttccagatatacgcctcgcggctccgccggacaccgttaacgcttgagcccgctgtgccgtacgggacctacatcaagtggctgatggagcaagataaagaaaaagccgcttcgtactgggagcgataccttgaaggctttgagcagcagactgttctgccgaagcagaaaaaagccggcgaaagcagccaagaggaagtgacgttttccttttcaaaagaggacacagctaagctgaaagatctggccgtgaaagaagaggtcacgctgagcaccatttttcacacgctctggggcattttgcttcaggcgtataaccagacagaagatgcggtttttggttctgttatttccggaaggccgtctgaaatcaaaggcatcgagcgaatgatcggcctgttcattaataccgtgcctgtccggatcagcggggcggacattccgtttcaaaagctgatcaaaaacgtgcaaaaggacgctttgaaaggacaggcatacagctatcatccgctttatgatatacaggcgaattcacaggtaaaacaaggcttaattgaccatattctcgtctttgagaattatccggttgaacaggagcttgatgtactgaacagcaagggggacacgaaagacctttttcacatccatgatttcagcatggaagacgaaaccaattacagtttttacctgatggtggcgccgggtgacgagattcacttgaaaatgagatacgattcaagcatgtatgaccgccaatttatcgaaaatatcaaaggtcatttgacacatatcgtttcccagattctcgacaaacctgatatcacgccggataagcttgtaatcatcactcctgaggaaaaagagcagctgcttgcgccgatttctgaagagactgaaaagcctgagtatgacacgattcatgcgatgtttgaacggcaggccgcacaaacgccggatcaaatcgcgatccggtatgaaggcgggtcagtgacgtacaaagagctgaatgaatcggctaataagctggcccgtctgctgcaaaaacgcggattaaagcgggaggagccggtaggcgtcatgctcggccgttctccttctttagcggcggccgttctcggtattttaaaagcgggcggcgcctttgttccgatagatccgggcagtccaaaggagcgtatccgatatgttattgaaaacagcggctgcatccatgttgtaacagagcggcatcagtcactccccgcggaacaaacgctgcaggttacatatatagaagaggccgggacggaagcggacggaagcaatgtgcaatccattaatacggcggacgacctcctttatatgatttatacatccggtacgacagggaaaccgaagggcgtgctgctcgaacataaaaatatggccaaccttctttctgaccaattgacgaacacaggcattgatttttgcacaaatgtgctgcagtacgcatctttggcgtttgacgtctgctatcaggagttattttcagtactcttgagcggcggcaccctttgtatcgtgcccgaatcaatcaaacgggatgtttctcagctgtattcgtttatcgatcagcacaaaacggaagtggtgtttttcccgactgcgtttgtcaagatgcttttcaatgaagaaggttatgcacagtcttttccccgctgtgtgaagcatgtcattacggccggggagcagctgactatctcacgtttgttcaggcagacgctccgtttacacggtatgcagctgcataatcattacggcccgtcagaaacccatgtggtttcaacgtatacgatttctgcgggagatgacatacctgaacatccgccgatcgggaaaccgatccatcataataagatgtatattctcagcaaaaacagacagcttcagcctctcggaattgcgggagaattgtatatttccggagcgaatacaggaagaggctatgtgaacaatccggcgctgaccgaagagaaatttttgccggatccgttcagaaagggcgccgtcatgtaccggaccggagatttggcaagactgcgtgcggacggccaaatggaatacatcggccggacagatgatcaagtgaagatcagagggtaccggattgaaccgaaagaaattgaaaccgttctggcaaatcatcatgccgtgaaagaagctgccgtgctgattcaaacgaatgagtcgggcgaaaatgaattatgcgcctactgcagcgtctcacaagcgactgatccttctcagctgcgaagtgatttggccaaagagctgcctgattatatgattccggtcaaatgggctttcattgacgcgattccgctcactgcgaacggtaaagtcgatcagcgggcccttccggaagcttcggcgtacgcagcgggccgtcgatatacagctccccggaatgtgaccgagctgaagcttacccgcatatgggaagaagtgcttcaaaccggcccgatcggcgttcacgatcactttttcgagcttggcggccattcattaaaggcgacggcactcgttgcaaaaatagctaaagagtgcagcgtgcaaatcccgctgagtgatgtcttcagctatccgactgtagaagaactcgccaaaatcatcggtgaagcagaagagaatccgttcgcatccatagaaaagacagaagcaaaaggaacttatcctgtctcatccgctcaaaaacggatgtatgtccttcaccagcttgaaaatggcggtgtcagctataacattccagccgttttagaggtgaaggggccgtttgaccgagacaggatggaagccgtgttcaaggagctgatccggcggcatgaaccgctcagaacgtcctttgaagaaaaaaacggccggcctgtgcagaggattcatgacgaagtgccgtttgcatttacaaaagaacaatcagccgaagcgtttatccggccgttcgatctcggcaaagcgcctcttttccgggcgggatttgtccaaatagaaaaagaccggcatctgcttttagctgacatgcatcatattatttcagacggcgtatccgtcaatcttttgatacgtgaattcagtgagctgtatgctgagagaagtctgccgccgttacggattcaatacaaagattatgccgtctggcagcaatcatttaaggcgggcgccgcatatcggaaacaagaggagtactggctgaaccggcttgccggggagattcccgtgcttgaattgccggctgataagccgcgtcccccggtgcggagcttttccggtgaccgggtgtcatttgtcatcagcgaaaaacatacagcgcagttgaaaaagctggcgaaagaaaacaaatgcacactttatatgacgctgctcggtgtgtacacggttctgttagcccgtttaagcggacaggaagatatgattgtcgggtctccgattgcaggaaggcctcatgccgaccttgacgccgttctgggcatgtttgtcaatacgctcgctttcaggacgcgtcccgacggaagcatgacgttcaaagaatatttaaaggaaattcgccaaacagcgcttgaggcttacgagcatcaggattacccgttagaagagctcgtcgataagctcggtgtgccgcgggacatgtcccgaaatccgctgtttgacacaacatttgcgctgcaaaatatggaacagcagaagcttagggcagccggacttgaactgcagccggcagacgtcagcctgccgatttctaaatttgacttatcgctgtacatctccgaaaacgccggtgaattgtactgccagtttgaatacagcactgatttgtttgagagaaaaacgattcaaaaatgggcggaatttttcacgacacttgctgaaaacgccgcagctgatccgggtttggaattagacgatatttctgttttgtcagaaaaagaagaagtgtctctgcttcaaaatttcagccccttgcagaaaacagcgtttccgcttcatcagccccttcatgagctgctggaacaacaggcggaaaaaacgccggaccgtccggcgattttaactgatgagatttcgattacgtatcaggaactgaacgaaagagcgaatgagcttgcgcaccggctgatcaaacgggggataaggctggaggataaaactgccattatgggccggcgttctcctgacatgctgatcggcatttacgctgtcttaaaagcaggcggtgcatatctgccgattgatccggattacccggaagagcggattcgctttttactgaaagacagcggcgtgaaattcttactggcagaaccagaacttttcgcaccagatctttttaagggagaaacgatctctctgaaaagcggacaaacaggaaacccggaagctgcggccaaccccaatgttccggtaaagcctgattcattggcttatatcatctatacatccggttctacgggacgcccaaaaggcgtgcaggttgaacatcagtcagccgtaaactttttatactcgctgcaagcgcgttatggattaaaggattccgacaccattttgcataaaacatcatactctttcgatgcttcgatttgggagctgttttggtggccgatcgcgggagcttctgtttttctccttccgcaaggcggcgagaaagaccctgaaatgatactgaacgcattggagaaaaaccgcatcacggcagctcattttgtgccatccatgcttcatgctttcttggaatatataaattccagaaaacagccgatcaaaaagacctgcttaaaaagggtttttgccgggggcgaacaattgggcccgcacttggtttcccgtttttatgaccttctgccgggaacggaattgacaaattcctacggtccgacggaagcgacggtagaagcggcgtacttcgatttgccgcaaggaaaggaatttcacaatgttccgatcggcagttccggacataacatgcggctgtatattttaaatcaaaagaaacagcttctgccgccgggctgtatcggagagctgtatatcgcagggaccggcgtggcccggggctatctgaaccgccctgagctgacggaggagcgctttgtcgttgatccgttttatccgggagaacgcatgtatcagacgggcgatatcgcacgctggacagaagacggccttgtcgaatggctcgggcgttcagacggacaggtgaaagtccgcggctaccggattgaaccgggggaaatcgaagcggcgatccggcgcatcgacggcattcgtgaggcggcggtcaccgcccggaccgaacacggcgaaaccgcgctttacgcctatatcgaaggacgaaaaagcgatgacgtgcgggcagagcttgcggcacgccttccggcctacatgatgccggctcagtttatagagatgagcgaatggccggtcacgccgagcggaaagcttgaccgccgcgcgctgccggctcccggcggagcggcagacagacaggcgtacaccgccccgcggaacgtcacggaaatgaagctttgcgccctttgggaagaggtgctgaaaaacggccccgtcggcatccgggatcacttttttgagcggggcggccattcgttaaaagcgacggctctcgtctcccgcatcgccaaagagttcggtgttcaggtgccgttacaggacatcttcgcccggccgacggtggaagagctcgcttcggttattcaggacttggaagagagcccgtatgaagcgattcagcctgcgaaaaaacaggacacctacccggtgtcttcagcgcagaaacggatgtatgtgctccaacagcttgaagacggcggtgtcggctacaatatgccggctgtgctggaactgacgggcacgcttgaccgtgtccggctggaggagacgttccgggagcttgtggagcggcacgagtcgctcagaacgtcctttgaaacggggcctgacggcgaaccggtgcagcgcatccatgacagcgtaccgtttcagctcgatgaggccgagtcagctgacgcattcgtccggccgttttgtctggaagaagcgccgctcttccgtgcggctctcgtgaaagaatcggatgaacgccatcttttattaacggatatgcatcatataatttctgacggtgtgtccgtcaacaccttgattaaagaattcggcgagctgtacgcaggccgttcgcttgcgccgatgcgccttcaatataaagactatgccgtctggcagcggtcgtttcaggagaaagaagggtaccagaagcaggaagcctattggctgaagcgacttgaaggagagcttccggtgcttgagcttccggctgacaagccccgtccggcggtcagaagctttgcgggcgggaaagtatcgtgcacgcttgacgctgaaacggcatccggccttcaccgcatcgcccgggatcacggctccactttgtatatggtgcttctcgccgcgtacaatacgttactcgcgagattgagcgggcaggaagacatcatcgtcggatcgccgattgccgggcgcccgcacaaagaccttgaaccgattctcggcatgttcgtcaacacgcttgccatcagaacggagccgaaaggagacaaacggtttaccgattatttggcggaagtccgccaggcggcgcttgaggcgtatgagcatcaggactacccgtttgaagagcttgtggaacggctcggcgtgcagcgggacatgagccgtaatccgctatttgatgccatgcttgtcgttcagaatatggaacatgaggaattgctgttggacggtttgcatattcagcctgcggacgtgtcccgtccggtttccaaatttgatgtcactttgcaggcttctgaaggcgggggacagattcattttctgtttgaatatgcggcgtctttattccggaaagaaacgatgcagcgctgggcttcccactttatgacgatgcttgaacacattgtccgtgaaccggaaacttctatacaagcgatcagcatgctgactgctgcggaacgggaccgaattctttcggactttaacggcatgacggataaacagctgcctgaaaaaacagttcatgaactgttcatcactcaggcgcgaaaaacaccggatgcggcagcccttatcagcggggaaacgttggtcacatataaagaattagatgaatggtcgaataaaatcgccagagctctgcaaaaacggcagatcggaccgaatgccgccgtcggcattgtgataccaagatcaccggaacaagtcgccgcagtcttcggggtttggaaagccgggggcgcctacgttccgatagatcctgaatacccggaggaacgcaagcaatatatcatttcagacagcggcacagcgcttctccttaccgtacacggcgcaatagatcaagtgcctgatcattttaaaggtgaagtgctcgcactggaggatatccaagaacaagacgcatcaccggttcagccattatcagcaccggaagatttggcttacatcatttacacgtccgggacgacaggcaggccgaaaggggttatggtcgaacatcgttccgtcagccaaacccttcaatggcgaagcggattttatgatctgaatgagaaagatacggttcttcagcttttttcattttcatttgacggttttgtaacaagtatgttcacaccgctgatttccggtgcgaaagcggccgttttagccgaagatgaagcaagagatattcttgccattaaacactatcttgcatcttaccgcatcactcatatgatcattgttcccgtactgtaccgtacactgcttgacgtactggagccgggggatgcagagtctctcagaattgtcacattagctggagaagctgtcgaccaaaacattatcagccgcagtttatcagtttgtcctcacacggagcttgccaatgagtacggcccgacggaaaacagcgtcgccactacagcggcaagacatatagaacaaagtgagaacattacgatcggccggacgattgagcattcacacgtttatattttaaacggggatcacccgcagccgatcggtgtaacgggagaactttgcatttcgggttccggccttgcaagagggtaccgcaatcttcctaagcaaacggcccaagcctttgtccaagacccgttccagaagaaccggcgcatgtaccgcacaggcgatctggcaaaatggctgccggacggcacgctgcaatatatcggccgaatggacgagcaagtcaaaatcagaggctaccgggtggaactgaaagaaattgaatcggccttaacaggcataaaaggtgtcaaagaagcagccgtcaccgctcataccgcatcagcaggccaaacggaactatgcgcttatatcgtgacagaagaaggaacagaaagtgaaaccgtgcagcaggcgctcagaaatgaaatgcccgcttatatggtgccggcgttctttgaaacacttgaagccctgcctgtcacaccgaacgggaagcttgaccgccgcgcgcttcctgagccgcggaaaaaagcgcacaccggacgggcatttacggagcctgaaagcgacatggaaaaagagctttccgcgatttggagcgaagtgctcggaactgaaaacattgccgcggatcaatcattttttgaactgggcggcgattccatcaaagccctgcaagtatcagcccgattacatcaggcaggaaaacagatcgccgtaaaagatattttcagccggccgacaattagagagctggcgccttatgtccgtacagagcggcagccggtcagccaagctcctgcagaaggagaagtgaagtggtcgccggttcacaaatggttcttcacacaagacatgaaggaagcaaatcattttaaccagtccgtcatgctgacgagaacaaattcaatagatgaagaggctctcaggaaaacgttaaaagccattaccgttcatcatgatgctttgcgccttgtctgcaaaaaagacgaagagaaaggtcttctcctcttcaacagaccggctgacctcgcagatgagcagctttacaacctgaccatattagaaacggaaggcgatgagcatgagaaggaacgttttataaaacgccgcgtcgcagagcttcagagaaacatggatttggagaacgggccgctggtacaggcgggactgttccgctctgaagcagaagattacttgtttctgacggtccatcatctcgctgtcgacgggatatcatggcggattttattggaggacttggcttctgcttatgagcaggccgcctctggacaggaaatcaaactccctccgaaaaccatgtcattcaaaacatatacggagcagctggccgattatgccgaaagcaaacagcttcttcagcaggcggagtattggcgggagattgaacactatgaaacagaaagtcttccttacgagcaggcagatctatctcaaactcctgcaaaaaaacggaacacggtatccttcactctgacagaaagtgaaacggacgccctgttgaaagatgtgcacagcgcctacaatacggatacgcaagatgtgctgttggcttccgccgtgcttgcccttcaaaagtggtcgccgcagcacgctttgaaaatcgcccttgaaggacacggacgccaatcggagcaggcaggtgcggacatcagcaggacagtggggtggttcacttccatttacccggtgcttgtccggagcggagtttatgaacctcttgaagaatatgaaattcgcacattgaaaaccgttaaagacacattgcggcgcattccggataaagggaacggatacggcgtcctcaaatatttaacaccgccgaagcttgccgggatgactttcgggaaagcaccggagatcagctttaattatctcggacaattcgatgcgcccggcgggagtccggcagaaacggaacagcctgacgcgtttcagttttctcctttgggaggcggagatgatgtcacagatacatggaaacgggagcagtcacttgaaatcagcgctattgcggcaaaaggccggatgaccgtcagcatttcctatgaaacggagcgcttccggcaagatacgatcgaacggctgtccgaaagctgccggtattatctcctgaaactgtcggaacactgcctcagcaaaaccgatacggagaagaccgtcagtgactttgatgatcgggagctgactgaggaagccttgcaggatattgccgacttactcagcttccactaaaccgagcgggaggaacacatggacaaaacaaaaaacatccaaaatatttatcccctcagccgaatgcaggaaggaatgctttttcattcctttctgcaaaaggagggggctgcatatatcgagcaatccgtcttcaccataaaaggccggcttcgtccggaattgtttgagcaaagcgtacagtctgtcatcagccgtcacgatattttcagaacggtttttttacctcatgtcgctcagctgaacggcccccgccaagtcgtgctgcgtgagcgggaattccggctgcaccgcgaagatcttacacatttggatgaagcggaacagagcgcctacttacagcgatttaaggaacgtgaccgcttaaaaggctttgacttgcaaaaggatatgctgatgcgtgtgtctttgtttaaaacggctgaggaaaaatatgtatgcgtctggagccaccatcacatccttatggacggctggtgcctcggcatcgtccttcaggaattcatgcatatgtaccgggcgattgaatcaggctcacccgtcacactggcgcccgcaaagccttacagcacgtatattacatggctgactgatcaggacaaagacgcggcttctgagtattggaaaggatatttagcaagctgcgagacaccctcaggactcccgaaaatatcggcccgtccccagggaaaaggctaccgtaagaaagagctcctgttttctttagatcaaaatctgacagacaggctgaaaaccatcgccaaagaagagggcgctacgctcgcggttcttatgcagactgtatggggcctgatgctgcagcgctacaaccggacggacgatgccgtattcggcgccgtcgtatcagggcggccttccgtcattgacggcgtggaaagcatgatcgggctgtttatcaatactgtgccggtacgcattaaaacgggtgacgaaagctttagagaactgctgggccgctgccagaaagaaatgcttgattcagaggcgttcagttatcatccgcttgctgacatccaatctcagactgagctgaaacaggatttaatcgaccatatcatcgtgtttgaaaattatccgattcagcagcagatgagagacgcggaaaaggaatcggatgcaccgttccggatcgggaatgtcaatgtttcggaacaatcgggctacgattttaacctcatcatagcgcccggcgatgagctgatcatcaaattcagctacaatgcgaacgtttatgacgaagtatggatagagagcgtaaaaggacacttggaagaagcgctgcgcggcgccgccttcaatcccgatgttcccgctgatcggcttccgatgctcggacaaaaggaaaaatcaagaataatcggcgaatttaatgacacgaaaacaacgtatgaaagagacgaaagcatcatcagcctgttcagccgacaggtgaagaaaaccccggaccatcaggcgcttcacgccggcgggctgacgatgacgtaccgggagctcgatgaacggtcaactgcgttcgcccgcatcctgctggaaaacggtttggcgccaaaaggaattgccgggattcttgccgaacgctcaccggaatttatcatcgctgttctcgctgtattgaaagcgggagggacgtaccttccgctcgatgcagaactgccatccgacaggatcgccgaaatgctcactgagagcggagcacagctgttaacggtacaaaaagggattgagactgacattgacttttctcacatcatctctatcccggctgcagctgaaaaacaaacagctgatgagggaaaactgaataccgttacgtcacctgatgaccttgcctatattatgtatacatccggttcaacaggaaaaccgaagggtgtgatgatttccaaccgcaacgtcgtatcgctcgtgtcaaacagcaattacacgtcagccggcacgacggaccgtctcattctgacaggatccatcggttttgacgcagtgacgtttgaaatcttcggagcgctattgaacggagcgtgcctccatgtggttgaccgcacgacaatgcttgcccctgagaggttcggcaattatctttcttccaacggtattacgattctgtttttgacgacggcgctttttaaccagtttgcccaggcggatccggagatgttttgcggattgcacaccttatatgtcggcggagaagcattgtccccggcgctcatcaataaggtcagacaccgctgtccgaatctcagcctttataacatatacggaccgacggaaaatacgacattttctaccttttacgaaatcaggcacgatttttctcagccgatcccaatcggaaaaccgatcagcaattcaaccgcgtatatcattgataaaaatggcggacttgcgccgatcggcgtgcctggtgagctttgtgtcggcggggacggggttgccaaaggctatttaaacaggcctgacttaacaagtgaagcatttgtcagccacccggttcatcctgaagaaaagatctacagaacaggggatttggcacactggctgcctgatggaagcatcggatacatcagccgtatcgaccgtcaattcaagattcgcgggaagcgtatcgagccggccgaaatcgaagcgcggctgactgaaattgatggaatcagggaagcggcagtcatcgtgtcagacgaaggacaagaagcaaccctttgtgcgtattatacaggcgcacatgctgaagaaagagccattcgatccctattggccaggtcgcttcccgactatatgattccgcagtatgtgatgaagcttgaccgtatgccgcttaccgcaaacggcaaagtggaccgccgcgggctgcctgcgccggaacggaaaaaagcttcatcaaaagccgttccgccacgaaactgggtagagcgtgagctgatcgacatttggacgccgatcctcggctgcggggagctgggcatacaggatgacttctttgagctgggcggccattctttgaaagcattgcaagtgattcatcagctgaagaccaggcagcagatggacgtcccgattgaaatgatatttgaatatccgacaattgaacaattggctgaaaagctgtattcaaacacactgtcagaagctgccgaacagcatatcagcagactgaatcagccgaaaggccgcaatcttttctgttttccgcctatctcaggtttcggcattttctttaaagatctggcggcggcattaaatggacgggctgctgtgtacggttttaactttattgaagaagacagcagaatggaacaatacattgataaaatgctggaaatccagccggaaggcccttatatcctcttcggatattcagcgggcggcaatacggcattcgaggctgcaaaagcgatggaaaagcgcggcttagaaatcagcgacgtcattatcgcagacgcgtacagaaagcttgacgcactgccgccgcagccaacaaacgcaacagccgaaaatgtcccggaagccgtcagggaagcggtcatcagaaaaacagagcgctatcaaacgtactgggcggaactgataaatgacggccaaattgcggcaaatctccattttattgaggccggcataaaggaagagcacagtgataagaccgagccgatgaaatgggaaggcgccacaacgggagtctaccaggaatatcagggcgagggagcccataaagatatgtttgagcccgagtttgcacacaaaaatgccgaggtcatactggacatcatcgcaaacagcggaagacgcttggcgcggaatctgtaacatccggcagaatgactgaagaagacaaagggcaagataggggaatcacactcagtttttttggaggctttgagatgacgaacctatcttggcttacgtatgtaatgattattcttgccagctaccggctgacccatttgatcgtatttgataagattacggaattcataagaaaaccctttataaagcaagaaaaaaccgtcgatcaaaacgggcgcgccgtccaaaaaaaagtcccttcctccgcattcggttatatgctgcaatgttattggtgtgcgggcgtctggtgcgccatattgatcggcatctgctatttggtctggccccgctatgcacatccggttattttcattttgtccattgccggagcgcaggccattcttgaaacatgcgtcggcgtcggaacgaaggtcattgacgtgctcgccgccataaaacataaaaagtcctgaagcgttttgattcgctttaggacttttttctttcccttttaggctgagaggagcaaagcaggctttctgattcaccgcccggaatgcttcggaataccgtaaagcagagagggggaaaaacatgaaaagctgccgttttagcatgatatggtttttggccgttgtactgacagccggcatctttacgttctcagcatccgcacaagcaagcggcactcagccggagagagaaatgcgagccgtatggatcgcgtctgtcaccaatatcgactggccctctaaaaaagggctgtcaccggaagagcaaaaaagagaatacagcaagctgctggatgacgttcagaagatgggaatgaacgccgttatcgtccaaattaagcctgcggctgatgctttttatccatcagattacgggccttggtcagagtatctgacaggaacccaaggcaaaaatcccggctacgatccgcttgcttttttagttgaagagacacataaacggaatcttgaatttcacgcttggttcaatccttaccggatcacgatgaatcacacaaatttgaatgcgctttcagatgatcatcccgcgcgttcccatccggactgggtcgctgcatacggaaaacagctgtactataatccgggcattccggaagtaagacaatttataacggatggaatcaaagaagtggtcagccgttatgacattgatgcggttcatatggatgattatttttatccttataaaattgccggacaggaattccccgatcaggcggaatacgaacggtacggaaaagctcactttgcatcgattgatgactggcgcagggataacgtcaaccggcttgtaaaagaaatcaacgaaaccatcaaacgagaaaaaccttatgtcaaattcggaatcagcccgttcggcgtatggagaaatgccgcagatgatccgacaggctccgaaacggccgccggggtgcggaactacgatgacttatatgctgatacaagagaatggatccaaaaaggatacattgattacatcgcaccgcaaatttactggagtatcggatttaaagcggcggcatatgacgtcttagcggattggtggggaaaagaagtgaacaatcggccggtgcatttatatatcgggcaggcagcttataaaatcaacaacaatactgatccggcctgggccgacccgggggaatacggaagacagattacgctaaacagaggatcagcatggataaaaggcagcatgcatttcagtttaaaggatttaaaccgtaatccgctcgatgtgaaaaaccgtttgatcaatgacatgtacagccggcccgcattaattcccgagatgccttggctcggacattccgctttaaaaaaaccggctgtcaaacgggcggagaagaacgcttcaggccatacactctatatcgaagatgcgaaatccaacggtaaaaaaacggcttattacgccatttaccgcgcagaaaagggaaagcagccttatttagtggatacagtcagaaaaacatcgtcacggacgcagacattttcagatactgttattcgggcggaagaagcatgcacctatatcgttacttccgttgacaggcttcaccatgagagccgtccctccgcaaaacggacgattaaatagccattattaataaaactgacagttgcggcactgtcagtttttttttgcggcggatgagtccgaatgttcagactttatttggatggaatgaataaagacccccattaataaaatgtagaaagcagcagaaggaggaaggttaatgaattttcaactgacaaaagaacagcagatggtgcgcgaaatggtcagagatttcgccaaaaatgaaattgccccgaaagcccatgaggttgatcaatcagccgtcttcccgatagacacatttaaaaaaataggcgaactcgggctgctcggaattccgtttccggaagaatacggcggggcgggcggtgacaccatttcatatgcagcagcggtcgaagaaatcggaaaagcctgcggcagcacggggctgagctacgcggcagccgtgtcactcggcgcaagcccattatactatttcggtactgaacagcaaaagcaagaacatcttgttccgcttgcttcgggaaaagcgctcggatcattcgggctgacagagccgaatgccggttcagatgccggcggcacccagacaaaagccgagaaaaagggcgatgactatgtgataaacggagaaaaatgctggatcacaaacgcaaattacgcccgcacggtcattgtcaccgccgttacgggaaagaactccgccggaaaaccgatcatttcagctctcatcgtcccgacagacacaccgggatttacgatcacaaatccgtacgacaagatgggtgtgagaggatcggatacggccgagcttgtgctggaggatgtcagggtgcctgccgataacctgctcggtgatcctgaaaaaggttttaaacaatttttatatacattagacggcgggcggatctcgattgcggcactggctgtcggtatcgctcaaggcgcactggaggcgtcgctgtcatatgcgaaggaacgcaagcagttcggcagtccgatatcgtcatttcaagccattcaatttaagctggccgatatggcgatggaaattgaccttgccagacaaatggtgcttaaagcggcatggctgaaggatcaaaacctgccatttacgaaagaagcggcattcgccaagctttatgcttcagaaatggccgtcagaacctgccttcaggccatccaaattcatggcggttccggttatatgaaggaatgcggtgtcgaacgtatgcttcgtgacgcaaagctgatggagattggagaaggaacatcagaaattcaaagaatggtcatcgcaagacagcttttgaagtgaaatgaaaacgtttactaagacagggatggaagggggcaggtcatatggctgaacttatccatttaacagccggaaagctgcttgagcggaccgcggagctttttccggatcatgaagcggttgtttaccctgagcgcggccttcgttatacgtatgccgagtttgaccggttatgccggcaaaccgcaaaagggctgatgaaactgggaattgaaaaaggagatcatgtggccatatgggcatccaacataccggaatggctcgcggcgcaatttgcaacggcgaaaatcggcgctgttctggtcaccattaatacaaattttcaaatcgcagaactcgattacctgctggcgcattcagacgtctcggccctgataatcatggattcctaccggcagacatcttatgttgagatggtgaataagctgattccggagctgaaaacttgtgagcacggcaggctgcgttcgaaacgttacccctttttacggacggtgttatatatcggtgataaaagtccgcccgggatgcaccgctgggattctttgctgaaggaaggcgaagctgtaacggatgcagcgcttgacggaaggatggacagcctgaaaaaggatgattgcattcatatgcaatatacatcaggtacgaccggatttccgaaaggcgtcatgctctcacattttaatatcgtaaataacgcggccaatatcgcagaatgcatgaagcttacttcaagtgaccgtttatgtattcccgtgccgtttttccactgcttcgggtgtgtgcttggcgtgctggcatgtgtttccgcgggtgcggcgatgattccgatcgaacagttttctccaccggccgttctgaaaacggtggagcaagaagcctgcacggctctgcacggtgtaccgacgatgtttatcgccctcctaaatgacagccgcttttctgaatatgatctttcccacgtccgaaccgggattatggcaggctcgccatgcccggcggaagtcatgagagaagtgatcggcaaaatggggatgaccggcattaccattgcctacggacagaccgaagcatcacctgtcattacgcagacaagaacggatgattcatttgaaagaagagtggaaacagcggggcgcgcgcttccccatatcgaagtcagaatcgttcggcccggaacatcccaagaagccgaccggggcgaacaaggagagctctgcacccgcggatatcatgtcatgaaaggttactataaaaatcaagaagcgaccgaagaagcgatagacaaggacggctggctgcataccggtgatttggctgtcatggacgaggacgggtactgcaaaatcacgggccgtctgaaagacatgctgatcaggggcggcgaaaatatctatccgcgcgagattgaggaaatgttatatcggcatcccgcagtggcagacgttcaggtcgtcggcgtgcctgatccgaaatacggagaagaggccgcggcgtgggtcaggctcaaagacggacaaaccgcttccgcagaagacatcagaaccttttgcaaagaacatatcgcccgctataaagtcccaggtatgttttgtttacagatgaatatccaatgacagcctcaggaaaaattcagaaattcaagctgcgggaaaaaacgattgaagagctcaagttaacttaatgaaaaaggagtgcttcacatttgtttaaaaaagtcctgattgccaacagaggagaaatcgccttaagaattatccgcacctgcaaacgtctcggcatcccctcggcagctgtgtattcagaagccgacagggacgcgctgcatgtaaaagcggctgatgaggcctatccgatcggtaaatcgagagtaaatgaaagctatttacatatcgacagaatcatagaagccgccaaatccgccggagcggacgccattcatccgggctacgggctgctgtcagaaaacagcctgttcgccgaacgctgccggaaggaacaaatcacatttatcggcccgcccggtgatatcatcgccaagatgggcagcaagatagaagcccgaaaaacgatgcaaaaagcaaaggtcccgatcgttcccggtgtttcagagccattgcccgatgttcactccgccttagccgaagcccgtgccatcggctttccggttatgctgaaagcgtctgcagggggaggcggaatcggcatgcagatcgtacattcagaagaagagctggccaaagcgttcgaaggcaatcaaaagcgggccgcgtccttttttggagacggcgcaatgtatatggaaaaggtcattgaaaatgcccgtcatattgaaattcagattctcgcagattctttcggcaacaccgttcatctgtttgaacgtgactgttcagtacaaaggcgccaccaaaaagtgatagaagaagcgccgtcgccgtttgttgacgatgaattaagacaaagactcggtgaaaccgccgttaaagccgctaaatcgatcggctaccaaaatgcaggcacaatagaatttctcgtcgaccaaaagaaacaaatctattttttagagatgaacacaagactgcaggtggagcatccggtgacagaagaaattacaggactggatcttgtggaagaacagctgaaaatcgccgccgggcaggcgctgactttctcgcagaaagatatcaaccaccgcggtcatgcgatagaagtgcggatctatgcggaagatccggtcaccttttacccgtcacccggtaccatctcgtctttttccgttttaagacacccgtcagtgcgacacgaatgcgccgtcgaaaagggaagcgtcatttctccgttttacgatccgatgattgccaaaatgatcgtcacggcgaatacgagaaaacaagccattgaacaactgaaaaccgcccttggcgaatatcatgtagaagggattaaaaccaacattccgctgcttacaaaaattgcacattcagaagtgtttgaaaagggtgaggcaacaaccggttttttacaaacaatgaacgagggggcgtcaaaatgagcgtcataaaaattcagatggcgggaaacctgtggaaaattcatgtgaagcccggtgatgtcattgaagaaggacaggaagtggccatcttggaatctatgaaaatggaaattccgattatcgctgatgcagcgggtacggtgaaagaagtgaaaaaatcagaaggtgatttcactgatgaaggagaggtcctgattgaacttcaataaaacgggaggtgcagcatgaactgtccggaatatgtccgcatcaatgaagtaggaccgcgtgacggcttgcagaatgaatcggcgtgggtggatacagaagataagattgagtggatcaatatgctgtcaaaaacaggccttccctatatcgaagtgacatcattcgtgcatccgagatggattccggctcttcgtgacagcctggacgtcgcaaaaggcattgccaggtctgaacatacggtctacgcggcgctcgttccgaacctcatcggactggagcatgcggcagaaggcggaatcgatcaggcctgtgtatttttatctgcaagcgaaacccataaccaaaaaaacgtaaacaaaccgattgaccggaccgttcaagagctcaggcgggttattactgaagcaaaagctgaaaaaatggcgacgagagcttatctgtccactgtgttcggctgtccgtacgaacagaacgtgccggtcgaacaagtcatccgcctgtcagacacactgctcgaaatgggtgttgatgaaatatcgctcggcgacacgatcggcgcggcaaaccccttgcaggtcatatccgtgcttgaagcccttttgccgagaattcccgcctcaaaaatcgcactccatttccatgatacaagaggaacggctctagcgaatatcattcccgctcttgatatggggattacatccttcgatacttcctcaggcgggcttggcggctgcccgtacgcccctggatcagcaggcaacgctgccacagaagacgtcatttatatgctcgaacaaatggggattgataccgggacggacatgaataaacttcttgatgccgcccgctggatcgcggataaaataggcaaagatctgccaagcagaaatctgcaggcattcagaacgaaatgagaaaggagaagccatgggagattgcgtcttgtattccgtctgtcaagaaacgatcggtctgatcacgctgaaccgcccgcatgcggccaactcgctgtcttcagaaatgattgatcatttacagcgtgtgattgaagacatcaaaaactcgccatccattcgctgtgttattctcaccggctccggaaacacattttgcgccggcgctgatttaaaagaaagagctgggatgaatcatgaacaagttaagcaaagcgtcaggcgtatcggtgaaacggctgcatccattgaagctctcccgcagccggtcattgcagcgctgaacggaaccgctgtcggaggaggccttgaactcgctctcgcctgcgatatcagaacagccgtcagccgggcgggcctcggccttcctgaaacagggcttgcaatcattcccggggcgggcggaacgcagagactgccccggcttatcggccccggcgcggcaaaagaattgatctataccggccgaaggctttctgccgaagagggaaaagacatgaagctgatcgagcatgtttgtgaagccgatgaacttatggaaaaagcaaaagcactggccggccgcatcgccgctaatgggccgatcgccgtcagacaagcaaaatccgcgataaacaagggtctggagacagatctcaatacagggctcgaaatcgaacgaaaagcatatgaacaagtcatccctacacttgacagagaagagggcctgcgcgcttttaaagaaaaaagacccctgaatacaaaggaaaataaaacatggagggactcggatggattacgaaaaagaacggcagacacgcagcaaaacgattgaaaagggaggagccgcgaaatatcatgcaagcaacgaaaagaagggaaaactttttgtaagagacaggctgaagcttttattcgatgacggcatatccgttgaagacgcttttttcgccgagtgcatgtcagacggactgccggctgacggggtcgttaccgggatcggaaccatcggcggcagaaccgtttgtgtgatggcaaacgactcaaccgtaaaggcgggctcgtggggcgcgaaaacggtggaaaaaatcatccgcattcaggagacggcggagaagcttcagtgtccgctcttgtacttagtcgattccgcaggtgcgagaattacggatcaggtcgacatgttcccgggcagaaggggagccggccgcatcttttataatcaagtaaagctgtcgggccgcattccgcaaatctgtttattgttcggtccttccgctgcgggcggcgcttacattccggccttttgcgacattgtcattatggtcgaaggcaatgcatccatgtacttaggttccccgcgcatggcagaaatggtgatcggcgagaaagtatcgcttgaagaaatgggcggcgcccgtatgcattgttctgtatcaggctgcggtgatctcctcgccccgacggaacaggaagcaatcatgatggcgcagacatatctcagctactttccggcaaattatactgaaaaagcgcccgtcaacaaatctaagaacccgaaagcttttgaaaaaccgctctcagatgtcatcccggcacatcaaaacgcaccgttcaacatgatggatttaattgaacgtgtcattgatgaagactcgttttttgagattaaaccgttatttgcgcaggaattaataacggggctcgcgcggattcacggacagccggtcggcattatcgccaatcagccgcgtgtcaaaggcggagttttatttctcgattcggcggataaagccgcaaaatttatcgctttgtgcgacgcattccatattccgcttctgtttttagcagacattcccggattcatgatcggaacgaaggtggagcaggcgggcatcatcaggcatggcgcaaaaatgatctccgcaatggcggaagcgactgttccgaagctttccgttatcgtcagaaaagcctacggtgccggattatacgcgatggcggggcctgcttttgaaccggactgctgtttagcgcttccgactgcgcaaattgccgtaatgggtcctgaagcagcggtgaatgcggtctacgcaaacaaaatcagcgagctggcccctgaagaaaggccggcttttattcaagaaaagcgtgatgaatataaggaagacattaacctttaccggcttgcctctgaaatggtgattgacggcattgttcctgctgattccttgcgggaagaactcaataaacgcctcactgcttacatgtccaaacaactgacattcacacaccggaaacaccccgtatacccggtataaataaaaaaagactgcatagatccggctcgcagccgttcttatgcagtcttttttcacagtcttgatctcattttcttcacaacaaaataaacaacaataaatacgagagccaatataatgatcggagttgtatacattccggcatagctgtctacgtctttccactgtcccccgagctgatacccgagataaacgaaaatgacagaccacggaataatggcaagcgtcgtcaatatgacaaacttggaaagaggcattttcgcaaggccggccgggatggaaatcgcatgtctgacgaccgggataaaccgcgccgagaacacaacgccggcgccgtaacggcgaaaccagttttccgcaacatcaacatgatgctttttcagaagtaagtacttgccgtacttgtccaaaaacggccgtcccccataacgggcgatccagtatataaagcactgcgcgatcgttcccccgatcacaccggcgacaatggcgccgataaagctgatcgtgccttctgacaccatatagcctccgtaagccagaacgatttcactcggaatgatttcgatcattaatccgagcgcaatccctaaatagcccatacttgtcagccaggataatatttcactaataaaattgcccacactgttcacaacctctttatctttttacccaattatatgactgattgacaagcaaaatggttacaaattattttttaacgcacgatttcttcagattctctttttaacacctcttctaaataagctaaaagtttcggtctcatttcttcccgcagaagcccgatctccgtgccggccttaaaacagccgaacttatctcctatatcaaaccggcttccttcaagctcccgcgcgtaaatgcttcgggtgcggcatacttcgcgcagcgcgtctgtcaattggatttcgctgcccgcgcctcttccgatcgtcttcagcgctttaaaaatggcaggggttaatatgtaacggcccaacacggcaatatgagagggcgccttttcaacggccggtttctcaatcagatcctcaacccggtacacatgaccgctctgccgccccgtctgtataataccatatttgctgacatcagcaggatcgacgggctgtacgccgatcgtttctgtgccgtgttggttatagacgtctatgagctgtgaaagagcgggagtgtcagataccataatatcatcacctaatagaacggcaaaaggctcatctccgataaaatgctccgcacacagcaccgcatggcctagtccgagcggttctttctgacggatgtaatgaatattggccaaatcggcaatccgctgcatttccttcagtgtctctgacttgcctttttccttaagattgatttccaactccgccgaccggtcaaaatgatcttcaatcgagcgtttgtttctccctgtaataatcagtatatcttcaattcctgactctcttgcttcttcgacaatgtactggatggccggtttgtcgacgatcggcagcatttctttcggctgcgcctttgtcgccggcagaaatctcgttcctaaacccgctgcggggatgaccgcttttctcactttttttctcattcatcttcactcctgatcctgtatgtttttcagcgaatctccaaatacccagattcggtttccgataaaattcatcatcattccgccgatagtggcggcgagcttactcaccaaaagcgaacagccgcctttttgaaacgcgtacagcagcaaaaaggtgattcccgacgctgcaagattaatgatgagaaagcgcacgatctctttcccgtcagccttgtgttttacacgaaacgtccacttccggttccacacatagctgttgatgatccctgccgaataggagcagatctgcgccggcagataggggacaaggcaagcggtgagaagaaagaagacaccaaaatcgatcagcgtattgccggcgcccacggtgcaaaaacggcctgctgtctttactttttctttcagcataacggcatccggttttgacctcccttcataagtaagatgcggatcgctgtcctatttgttgatatggattactttagcggacagtgttgaataaacaattactaaaatatgaacaaaacatgaaaacgtaatgaggctttgtaaaacccattaagttaacagttttatattttaggttgacatattacgtgcaagacactaatattctgtattagtgttaaccttttattattttggttaacattaaatttcgaaataaaagaaaggagggaaatttcatgcaggaagagacctattacagcgtcagaatgagagcttcccgaaacgcccccatgagcagggcggaaaacatatttccggcggagaacggctcatcacttacagcggtttacaggaagcggtagatggcttattacataaaggcttctcacactcaagagggatacctgattttatgcagattcagcttgaaagcgttcatgaaccgatcgaaacgatccgccctttgccggttgccctccatcaaacagacacgccggaaaaaggacaagcaatcgcccgcaagcttctgcaaaaggcggggattcctccgcacatgatcgagaaagcgtacgaaaacatttcggaatatgcagaagcaagaggagcggtcctgtttgatatccgggcaggaaaacgcattgactgcagagggaatagaggtgtgcgggtatcccgagtggattggccgtcacctgattttcaaaaatgggcttttactcacaacatgccggaaaattcacgaataaaagaagcacatgccatcgcggcaaaagtttgcgcacatccgggaattattgccgaattgtgctggtcagatgaccctgattacataacaggttacgttgctgcaaagaagctgggatatcagcggattgccaagatgaagaatgccggagatgaaagcggatgccgggttttctttactgatggctccatagatacggagagctgtatccattttttagagaagcagcctgtattcattcagcgggaggagaacatatgaaacaatcaatgattgaaaaaagcaaacagcatctttggctgcctttcacacaaatgaaagattacgatgaagatccgttcatcattgaaagcggaaacgggatcatgctgaaagacatcagcggaaaagaatattatgacggcttttcttcagtatggctcaatgtacacggccaccgcaaaaaagaaatggatgaagcgattcaaaaacagcttgaaaaaatcgctcattcgactttgctgggtatgacgaacgttcccgcaacagaacttgccgagatgctgacgggcatcacaccggaaaagctgacgcgcgttttttattccgacagcggagcggaagcaatggaaatcgctctgaaaatggcctttcaatactggaaaaacgtagggagacctaagaagcagacgtttatttcgatgcagaacggctatcacggcgatacaatcggagccgtcagcgtcggctccattgaactcttccaccatgtgtacggcccgctgatgtttgaaagctacaaagccccgattccttatgtatacagatctgaaagcggtgaccccgtacagtgccgggatgaatgccttcacgcgctcgaacagctgcttgcaaagcaccacgaagagattgccgcacttacgattgaatcgatggtgcaaggcgcatccgggatgatcgtcatgcctgaaggctttctggcaggcgtacgaaagctgtgtacggcatatgatgtgttaatgatcgttgacgaagtggcgacggggttcggccgcaccggaaaaatgtttgcctgtgagcatgaaaacgtccagccggacttgatggcggcagggaaaggcattacgggaggctatttgccgatcgctgtgacgtttgccacagaagccatttatgaagccttctacgatgactacgacaaaatgaaaacatttttccacggccattcctatacaggaaatcagcttggctgtgccgcggcaattgaaaatctgcgtttattcgaatcagagcgcatcgttgaacgagtcgccgaaaaatcaaaaacggctgcggaatttcttcatgatctgaagctgcttcctcatgtcggcgatgtccgccagctcggtttgatgtgcggcatagagcttgtgcaggataaggggacaaaacagccttatccgcctgaaaagcggatgggatacaaggtgtccttgaaaatgagagagctgggtatgctgacacggccgctcggtgacgtcatcgcctttcttccgccgctcgccagcacaaccgaccaattacaagccatgatctccattatgaaagaagcgatagccgaggtgaccggccgtggattttgacggatggctcctcggaaggctcgatgcggtgaaaagagacgggctgtatcggacgctgcgaacacaggaaaccgctcttaaaaccaaggggcaaaagcggcagacctgggcgtccaatgactatttaggtctgtcaaaagatgaacggctgatcacagccgcgcaaacagcgctgagccggttcggagcgggaagcggcggctcacggttaacgacaggaaatactgtgtggcacgaaaaacttgagcaaaaaatctccgactttaaacagacggaagcggctttattattttcaagcggttacttggcgaatatcggcgtgcttgcctcactgcctcaaaaaggcgatgtcattttaagcgatcaactgaaccatgcgagcattgttgacggctgccgtttatcaaaagcggaaaccatcgtgtaccgccatattgatatggctgatcttgagaaaaaacttgcctccgtccagactcggaaccgccgctttatcgtcacagacggcgttttcagcatggacggcaccatcgcgcctcttgaccgaataatgccgcttgcaaagcagtaccaggcatttgtgatagcagatgacgcgcatgcaaccggtatactcggggaaaacggcggaggaaccagtgactatttcggtgtttgtcctgatgttgtcatcggcacattaagcaaagctgtaggaacggaaggcggttttgccgcgggatcaaacatttttattgattttttgctgaatcaggcgcggacgtttatttttcagacggccctcccgccgtcaatttgtgcggcttcgcatacggcatttgacctcatatcagatatgcacgatacgcgccgtgagctgcagtcgtctgtcaaaaagataaaaacgcgtctggccgatatgggctttactgtaagaggcggagatacaccgattatccccgttatcatcggtgatgcaaaaacagcggtttcagccgctgcgctgcttgagaaaaagggaatctgcgccccggccatccgcccgcccgccgttccggaaggcgaaagcagaatcaggctgaccgttacggcggatcgcagcttacaggacatagacgagctgacggaagcatttgattccattagaaaagagctgaatataaacaaatgagaagtttttttgtcacaggaacagataccggcgtcggaaaaaccatcgtttcttgcggacttgccgcggcattcaggcagaaacaggcggatatcggagtgtttaaaccgtttttaagcggcgtgccgcggactcatccggaaagtgacacctcgctgttgaaaaacatgtcacaaaccgcactgtctcatgaagaaatcacgccatttgaatggaaagagccgcttgcgccgtacacggccgccatgcttgaggggaaatccgtgagcatggatgaagtcatggcccactggagtaagatcaaaaatcgtcatgagtgtttcatcgtcgaggggcaggcggcatttccgttccgcttggtgaaaattacttagtcagtgatttgataaaagccttggaattaccggcagtgattgtcgccaggcctgatctcggaaccatcaaccacacatatttaaccgttgaatatgcgaaaaacatgggaatagaggttctcggtattattatcaacggcgtaaagagccggccggggctggacgagaagacaaacccgagcatgattgaaacattatgcaaagttccgattttgggaatcacaccgaagctggatcacgtttcaccggaaaacattcaacacatgattgagaaacatatagatgtttcctctttcatgaatctgacacaaatggggagataaacatgaatcaatggatggatcttgcagagagagttctggacggggcggaagtaacgaatcaagaagcgctggccattttaaattgtcctgatgaggatcttttattgctgatgcatgccgcttttcatatcagaaaacgattttacggaaaaaaagtaaagctgaatatgattatgaatgcaaaatcaggcctgtgtccggaaaattgcgggtactgttcacaatcttcaatatcaaaagcgccgatcgagtcttatcggatggtggataagcatatattgcttaagggggcaaaacgcgcccatgacttgaatatagggacatactgcatcgtcgccagcgggcggggaccgtcaaacagagaagtagatcaagttgttgatgctgtcaaagaaattaaagaaacttacggtttaaaaatctgcgcatgcctcggtctgctgaagccggaacaggcagagcgcctgaaacaggcaggagtagaccggtacaatcataacatcaatacatcacaaaggaatcactcaaacattacgacttcccacacgtatgacgacagggtcaatacagtggaaacggcgaaacaatcggggatgtcgccttgttcgggtgtcatcgtcggcatgaaagaaacgaaacaggacgtcattgatatggcgaacagcttaaaagcgcttgacgccgacagcatcccggttaattttctgcatgcgattgacggaactccgttagaaggggtaagcgaattacatccggtgtattgcctgaaagtgctcgccttgttccgttttatcaatccgacaaaagaaatccgtatctcaggaggccgggaagtcaaccttcgttcgctgcagccgctgggactttacgccgcaaattcgattttcgtcggagattacttaacgacagcagggcagcatgaaacagaggatcatcaaatgctccatgatttagggtttgaagtcgaatccgttgaagaaatgaaagccggcctgcaatccgcctgcaatacggaggtataagatgacggcgggcctatcgactgcacatccgtccctccatgcggattcggatttttggaatgacccttacccgttttatgaaaaactgcgtgccattgatcctgtttataaaggaaccgtattaaaacatccgggctggtatgtcaccgggtataaagaagcggcagcgattttgaaagacacccggtttaaaaaccgcgtcccttttccggaagcttcaacgaaatatcaaaatctatctcatatccagcacgatatgctgttatttaaaaatcaatcagaccataagcggatgcggatgcttataggtaaagaatttaccgcaaagacggcggaatcacttcgcccctgtataaaagaaacggttcatgacttgttggatcaaatccaaaacaaaaaaaacgcagaccttgtttcagagtttgcctttccattggcaagcctcatcattgcggagatactcggagtgccgaaagaggagagatatcaattcagacaatggacggcagacgtcattcaggccattgatcttacccggtcaagaaagatgttagtcagagcaagcgacaccgcaggcaggctgactgcatatttcagagatttgattcacgagcggaaagcacatcctcaggaagacttaatcagcaggtttattatgggggaacagctttcaaaagacgaagtgctcgcgacatgtatcttacttgtcatagccggacacgagacgacggtaaacctcatgagcaacggtgtgtttactttattgaaacaccctgaacagcttagcgcactgagagaaaacccctcgcttattgaaactgctgtcgaggaatgtctgcgctacgacagccccgcgcagctgacggcacgcaccgcttcagaagactgtgaaataaatgggaagaccataaaaaaaggagagcaggtatatatccttttaggggcagccaatcgcgatccaagcatattcgatcagcctcataaaatggacatccaaagaaaaccgaatccgcatcttgcattcggaaagaacgcccatttttgcataggctcctcattagcgcgcatcgaagcacaaattgcaattctcacactgtttgagcggatgcctaagcttcggctggccgcacaccgccttgaataccgcaagctcattggttttaggtcgctcaaagagcttccggttgtccttggctgaatgaccatgcaggagggccggattttatcggttcctcttgcaggaaataaatgaaagaaaaaagaatacatatttataaagcaaaaatcctctctgatccatctcactatccctaaaaaaactcgctgctcagccattcaatatcatacagcaagaatctccttttctttcgccaaaacggaaaattcaccatgatgcacattttttcagcctcagaaacggtgcaaaatcggcatgttttctgctttattttcttgatctttgtaagcgcttactaatattgagcagaaaagagggggatttgtggacattgttattattttattggcattaggcatgctgatgtttgcggcttaccggggcttttcagtcattttattcgccccgatttgtgcgctgtttgccgtgctcctgacagatccaagcttcgtacttcctttcttctcgaatatatttatggagaagatggtaggatttattaagctgtattttcccgtatttcttttaggggccgtttttggcaaggttgttgaaatatccgggctcgccgagtcgattgcaaaaacaatcgtcaggcttgtgggagcaaaaagagccattctcgccatcgtcttaatgggtgcgattttaacgtacagcggcgtcagtctcttcgtagcggtgtttgccatttatccgtttgctaaaaacctatttattaaagctgatattcccaagcgtctgatacccggtacgattgcattgggcgcgtttacttttacaatggatgcgcttcccggcacaccgcaaattcaaaatgtcattccgacagctttttttaaaacaaacatttatgccgctccctggctcggactgattggcgcagcatttgtgcttacggccggaatgatttatttagaatcccggcgcaaaaaagcggccaatgccggagaaggctatgctggatttcaatctgaagtttccgctgcagaggattcctcaagtctggctaatgaaaaacatacgcctgttttaccgcaggaggcagaacccagccccgcgcggcaagtgctcgcctttgttccgcttatccttgtggggatcatgaacaaatgcttcacgatgtggctcccgcattggtaccctgacggatttgattttgcgcagctcggtttaaaagcgttcgggaagattgacctttcctccgtcactgcgatctggtcagtagaactcgcactgctcatcggaatcatgacaacgattttgttcgattggaaaaaagtgctcttcaatttgaaagaaggactgaatgagggcatcgggggtgccttgctggcgtcgatgaatacaggagccgaatacggatttggcggcatcattgcggcgcttcccggctttaaaatggtcagcagcggcatatcgcagacgtttactgatccgctcgtcaacggagcggtgacgaccactgcgcttgccgggattacaggatcggcatcaggaggaatgggcatcgctttaagcacgatgtcagcagcatatacagaagcaatcaatacattccacattccgccggaggtcatgcaccgggtgatttcgatggcctccggcggaatggacactcttccgcataatggcgccgtcattacgctgctcgcggtcaccgggttgacccaccgccaatcctacagggatatctttgccattaccgtcattaaaacagcagctgtgtttgtcatcatcgccatttacagtctgacgggccttgtgtagccaaaacagaaaggggaaacgaatatgggaaaaggaaaagtgatggactcttataaagatgctgctgcactgatcaaggatggagacaccctcatcgcaggaggcttcggcctgtgcggcattccggaacaattaattctcgcgatcagggacagcggcgtgaaaaacttgaccgttgtcagtaataactgcggtgttgatgattgggggttaggcctcttgcttgcaaaccggcagatcaaaaaaatggtcgcatcctatgtcggagaaaacaaaacctttgaacggcagtttttaagcggggagctggaagtcgaattggtgccccaaggaacgctcgcagaaagaattcgcgcgggaggggcgggcattccggcgttttatacacctgcgggcgtcggaacatcagtagccgagggaaaagaacataagacatttgacgggcgcacctatcttctggagaaagggattacagggaacgccgccatcataaaggcctggaaagccgatcctctgggcaacctgatgttcagaaagacggcgagaaatttcaatccgctcgctgcaatggcaggcaaagtgacgattgcagaggctgaagaaatcgtcgatgccggagagcttgatccggatcaaattcatacgccgggtatttttgtgcagcatgtgctgcttggcgggattcatgaaaaacggattgaacgccgcaccgtccggcaagcatgataaaggaggctgacagaatgagagatagcagaaaacgaatgatcaaacgggctgtaaaggaaataaaggacggaatgaatgtgaacttggggatagggatgccgacgcttgtagccaatgagataccgaatgattataacgtcctgcttcagtctgaaaacggcttgctcgggatcgggccttatccggcggaaggaacggaggaccccgatctgatcaatgcgggaaaagaaaccattaccgaggtaaagggagcctcgtattttgacagtgccgaatcctttgccatgattcgcggcggccacattgatgtagcgattctcggcgggatggaagtgtccgaacggggagatttggcgaactggatgatccccggaaaaatgatcaaaggaatgggcggcgccatggacctggtgcacggagcaaaacggattattgtcattatggagcatgttaataaatatggggaatctaaagtgagaacggaatgtacgctgcctttaaccggcaggcaggtggtcgatcggctgatcacagatttggctgtattcgattttcatgatggccgtatgacgctcaccgaactgcaggaaggtgtaacaatggaggaggtctttgagaaaacagaaggtcattttactgtcagccagtcgttaaaaaacggggtcagaccaaaatgaggaggtgccgccatggattcattgcttattgaaaaaacagccgttgtaacaggagcagccggaggaatcgggcttgaaattgcaagagaattcgcccgtgaaggagcagccgtcatcatctctgatgtaaacgaacaagcggggaaagaagcggcggcaggacttaaagatgaaggctgtgaagcagtcagcatcacatgcgatgtaacaaatgaaaagcaagtggccgacatgctgcagacggtcgagaaacaattcggacgtctcgatatccttgtgaataatgcgggcattcagcatgtcgcgcccatcgaggaatttcccaccgaacagtttgaacggctcattcgtgtcatgctgactgcgccatttatcgcaatgaagcatgcattccccattatgaaaaaacagcaattcggtcgaatcattaatatggcgtctgtcaacgggctgatcggttttcacgggaaagcggcatataacagcgccaagcacggcgtcatcggtttaacgaaagtcggtgcacttgaaggcgcggctgacggcattaccgtcaatgcgctttgtccgggatatgtggacactcagcttgtccgcaatcagttaaaggacatttccgcaacaaggaatgtaccgtacgagcgggtgcttgaggacgtcatctttccgctcgttccccaaaaacggctgctgtcagtgaaggaaatcgctgattacgctgtatttttggccagcgacaaagcaaaaggggttacaggtcaggccgtagtcatggatggcgggtataccgctcaatagttcttatatttttttaaaaacagccgctctgaacggctgtttttttatgcctgaaaaacttgttcactcaataggccgatttactgcccaaccggtatccgggctgggtcattcacatgttctgcggcgtattttgtccttgcagatttttctcatccagatccatttctgcgccgcatttataatcaagcgccatcagtttacaatccttcacagatatacaaatgaatttttacaataaacataaaatatgtaatttctgacacaataatgccaatagccctaaaacatatgaaacatgaagagcgcgacctaagtgatgaagagccggtaacaggctccactccggcttttcatcatctctctttaagactgattttcggtgaaaccccatgttttattttatgaataaatatatctaattcgtttgtaaaatcgaacaataactcctccgaaagtattctatacacatttgttataatcatgctaggatgttagataaagggataatttgtaggatattgtatttctgttcaatatgatcggaggaatctcatgaacaatcttgcctttttatttcctggacaagggtctcaatttgtaggaatgggcaaacaattttggaatgattttgtgctcgcaaagagattgtttgaagaagcgagcgatgcgatctccttggatgtaaaaaaactgtgttttaacggagatatgaatgaattgacaaagacaatgaacgcgcagcccgctattttaacggtcagtgttattgcttttcaagtgtatatgcaggaaataggggtgaagccccgcttcctggcaggtcatagcttaggcgaatattcagcgcttgtctgtgccggcgccctttcttttcaggatgccgttacacttgtaaggcagcggggaattcttatgcaaaatgcggatcctcagcagcaggggacgatggccgccgtgactcacctctctcttcaaacgttgcaggaaatatgttcgaaagtgtcgacggaagactttccggcaggagtagcctgcatgaattcagaacagcagcatgtgatttccggacaccggcaagctgtggaacgtgtcatcaagatggcggaggaaaagggagcggcatacacttatttgaatgtcagtgcgccttttcacagttcgctgatacgatcagcatctgaacaattccagactgtattacaccggtattccttccgggatgccgcatggccgatcatttcaaatgtcaccgcacgcccttacagcagcggaaattcgatcagcgaacatctcaagcagcacatgacgatgccggtaagatggacggaatcgatgcattacttgcttttacacggagtcacagaagtcatcgaaatgggtccgaacaatgttttagccggtctgctgagaaaaacaacgaatcacattgtaccttatcccttaggacagacatctgatgttcacttgctttccaattcagcggaaagaaagaaacatattgtccgtttacgcaaaaaacaactgaataaattgatgattcaatccgtcattgcgcgaaattacaacaaggattcagcggcttattccaatatgacgacggcattatttacgcaaatccaagagctgaaagagagaatggaaagacatgaaaatgagctctcagaacaagagctcaaccattcgatccatttatgcaaattaatttgtgaagctaaacagcttccggcttgggaagaattgcggattttaaaataaagcgcccaggaggggacctatgtataccagtcaattccaaaccttagtagaagtcattcgggaaagaagcaatatctctgatcgcgggatccgttttatcgaatccgataaaaacgagacggttgtctcttatcgccaattgtttgaagaggcgcaagggtatcttggctatttacagcatctcggcattaagccgaagcaggaaattgtatttcaaatccaagaaaacaaatcatttgtcgttgctttttgggcttgtatattaggaggaatgatcccggtgccggtcagtatcggagaagatgatgaccataagctgaaggtctggcgcatttggaatatattaaatcatccgtttctgattgcctctgaaaaagtattggacaaaataaagaaatacgctgcagaacacgatttacaggatttccatcatcaattaaacgaaaaatctgacatcattcaagatcaaacctacgattaccccgcttcgttttatgaacctgatgcggatgaactcgcctttatccaattttcttcaggatcgacaggagatccaaaaggagtcatgttaacgcatcacaacttaatacataacacgtgcgccattgggaatgccctagccgttcattcgaaagactctttcttatcatggatgcctttaacgcatgatatggggctcatcgcctgccaccttgttcccttcataaccggaatcaatcaaaatctaatgcctacagaattatttattcgcagacctattctttggatgaaaaaagctcatgaacataaagccagtattctatcctctcctaatttcgggtacaactacttccttaaatttctgaaaaacgaaccagactgggatttatcccacatcaaggtcatcgcaaacggtgcagaaccgatattgccggagctctgtgacgaatttttgaaaagatgcgcagcattcaatctgaaaagatccgccattttgaatgtttacggtttagcggaagcttcggtcggcgcagcattctctaaattaggtaaagaattcgttcccgtttatttgcatcgtgactatttaaatcttggtgaaagagctgtaaacgtcagcaaagaggatcaaaattgcgcttcattcgtcgaagtgggacgacctattgactattgtcagcttcggatctccgatgaagcaaatgaaagagtagaagacggaatcatcggccatatccagatcaaaggagacaatgtgactcaagggtattataacaaccccgagagtacggaaaaagcgctgacttctgacggctgggtaaaaacgggagacctcggattcattagtgaaagtggtaacttagtcgtaacgggaagagaaaaggacattattttcgtgaacggaaaaaatatctacccgcacgatattgaacgggtcgcgattgaaatggaagaggttgacttaggaagggttgccgcctgcggtgtatatgatcaaaagacacaaagcggagaaatcgtgctctttgttgtttacaaaaaatcacctgaaaaattcgcaccgcttgtcaaagagataaaaaagcatttgctcaagcggggcggctggagcataaaagatgtccttccgatccgaaaactccctaaaacaaccagcggaaaggttaaacgctacgaacttgccagacagtatgaggcagggaatttttcaacagagtctgccgccatcaatgaatatttggagagcagcccggaaacgtccggacagactcccattcatgaaattgaaacggaattactgtctatcttttccgatgtgctcaatgggaaaaaggttcacctcgctgacagttattttgatatgggagcaaattcattacagttatcgcagattgccgagcgcatagaacagaaattcggacgcgagcttgccgtttcagatctctttacgtatccttctatcactgatttagcggcatatctgtctgaaagccgggctgaaatcaagcaggacgtggcagcgaaaccaagccacgtgacgccgaaagatatcgccattatcgggatgtcgctcaatgtccctggagcatcaactaaaaatgatttttggaatctgcttgaaaaaggtgagcacagcattcgagaataccctgcatcccggctgaaagatgcggcggattatttaaagtccatccaaagcgaaatcaatgagaatcagtttgtgaagggcggctatttagatgaaatcgaccgctttgattactcgttcttcggtttagctcctaaaacggctcagtttatggaccctaaccaaagactgtttttgcagtctgcatggcatgcgattgaagatgcgggctatgccggcggcagcatgaacgggagccgtgtcggggtatatgcagggtactcgaaggtgggctacgattatgaacgtctcctttctgcgaattatccggaggagcttcatcaatatatcgtgggcaatctcccttccgtgttagccagccgaatcgcttatttcttaaatttaaaagggccggcggtgacagtcgatacggcgtgctcctcatcgcttgccgccgttcatatggcatgtaaatctttaatatccggcgattgtgaaatggctcttgccggcggtatccggacatcgctcttgccgatctgtatcggacttgatatggaatcttcggacgggtacacgaaaacgttcagcaaagattcagacggtactggcacaggtgaaggcgcggccgcagtcctgctgaaacctctgcaggatgctgttcgcgacggagaccatatttacggcgtaatcaagggaagcgcgttgaatcaagacggaacaaccgccgggattacagcaccgaatccggcagctcagactgaggtcattgagacggcctggaaagacgcgggcattgcccctgaaacactgtctttcatcgaagcgcatggcaccggaacgaagctcggcgatccggttgaatttaacgggctttgtaaagcgtttgaaaagtatacggcaaaaaaacaattttgtgcgattggttctgttaaatcgaacatcggtcatttgtttgaagcggcaggcatcgtcgggctgatcaaatctgtcctcatgctgaatcacaagaaaaatccgccgttagtgcactttaatgaacctaatccgctcattcattttcactcttcaccattttacgtaaaccaggaagctgcagcgttcccatccggtgatgagccgctgcgaggcggagtcagctcatttggctttagcggaacgaacgctcatgtggtattggaagaatatatttctcaaagtgagtatgcgcccgaggatgaacatgggccgcacctatttgttttatccgctcatactgaaaaatcactctatgaactcgcacagcagtaccggcaatatgtatcggatgacagccaagcttcattaaagtccatttgctatacagccagtacgggcaggactcatttggatcatggcattgccatgattgtatccggtaaacaagaactatcggataagctgacccgcctgattcagggagacagaaaccttcccggtgtatacatcggctacaagaatatgaaggaaatgctgcccgctcataaagaagagctgaataaacaagcagccgcactgattaagcagcgtttacgtacgcaagatgaacggatcacatggctgcatcgcgccgccgaattatttgtgcaaggagccgttatcgattggcgcgcgctttattcaggtgaaactgtacaaaagacgccattgcccgtgtatccgtttgaacggagccgatgctgggctgaagctgaccaattgcgcttaaacgaggacgaaaagagaggagaagcggcattgaatatcaatcaatcgaagtcgcacattgaatccttcctgaaaactgtaatcagcaatgcttcggggatcagagcggaggaactcgatctgaatgctcattttatcgggctcggaatggattctatcatgctgtcacaggtcaaaaaagccatcgcggacgaatttggggcagacatcccaatggatcgtttttttgatacgatgaacaaccttcaaagtgtcatagattacttggctgagaccgttccatcgtcctttgcatccgctccgcctcaagagaatgttccggcgcaggaaatacaggtcatttcagaagcacagtctgaatcggatcgcagagaaggtcaacaagagcatatgcttgaaaaaataatcgcttctcagaatcaattaattcaggataccttgcaagctcaattaaatagctttaatttgttgagaaacagcggacatcattccgatgagaaagaatacgctaaagcgcaagagaaatcaattccttctgtcaagcaggggcctccggccgtcactgcagaaaagaaagcggctcaagaagcgaaaccctatgttcctttccagcctcagaacctgcatgaacagggacactataccgcacggcaaaaacaatacttagaagatttcatcaagaaatacgcagataaaacgaaaggttccaaacaatatacggacaacacccgatttgctcatgcaaacaaccgcaacttgtccagcttccgttcgtattggaaggaaatcgtatacccgattatcgccgaacgttctgacggttctaaaatgtgggatattgacggaaatgaatatatcgatgtcaccatgggattcggggttaaccttttcgggcatcatccttcctttattacacaggttatcgatgattcagcccgttcatcattgcctccgctcggcccgatgtcagatgtcgccggtgaagttgccgaccggatccgcacatgtaccggagtggaaagggtcgctttctataattccggaacagaggccgtcatggttgccctgcgtttggcgcgggcagcaacaggaagaaagaaagtcgtggcgttctcgggatcttatcacggcacgtttgacggcgtattaggggttgccggcacaaaaggcggagccgcgtctgcgaatccgctggctccgggtatactgcaaagctttatggatgatttgattattttacattataacaatcccgattcgctggacgtgatccgcagtcttggtgatgaattggcagccgtactggtggaaccggtacaaagccgcagaccggatttgcagccgcgggcatttttgaaagaattgcgggcgatcacgcagcaatccggaacagctctgattatggatgaaattattaccggatttcggatcggtctcggcggcgcacaggaatggttcggcattcaggctgatttagtgacctacggaaaaatcatcggcggcggacagccgttaggggtagttgccggaaaagctgagttcatgaatgcgatcgacgggggtacctggcagtatggggacgattcctatccgcaagatgaggcgaaacgcacgtttgtggccggcaccttcaatactcacccgcttaccatgagaatgtcgttagccgtgcttcgccatttacaaaccgagggagaacacctgtatgaacagctgaatcaaaaaacagcctccctggttgatcggctgaatcgcttctttgaacaatcgcaagtgcctatccgcatggttcaattcggttctttattccggtttgtctcatcgcttgataacgacttgttcttttaccatctcaattataaagggatctatgtgtgggaaggacgcaactgcttcctatccacggcgcataccgcggatgatattgaacacatcattcaagctgttaaagacacggtgaaggatcttcgccgaggcggatttattccggaaggcccggattcccctgatgacggcggacataacaaatcaggggcgtacgagctttcagatgaacaaaaacaattggttatggcatcccattacgggaatgaagcgtccgccgctttaaaccagtccattatgctgaaagtggagggcgaactgcagcatacaccattaaaacaagccgtccggcatatcgttggccgtcatgaagctttacgtacagtgattcatcccgatgacgaggtacagcaagtgcagaaacggatgaatatagaaataccagtcattgattttactgttcacccgcatgaacatcggcagtcggaaattcaaaaatggctgacagaagatgccaagcggccgttccatttccatgaacaaaagcctttgtttagaatccatgtgcttacatcggctcacaatgaacatctgattgtgctcacgttccatcatatcattgtcgatggatggtcaatcgccgtatttgttcaagaactggagagcaactacgcggcaatcgtacaaggaaaaccgatttcaccgaaagaggcagatgtttcgtttcgccaatacttagactggcagcaggcacagattgacagcggccattatgaagaaggggtccgttattggcggcgtcatttctctgaaccgattcagcagccaattctgccgagcacaggttctgtccgttatccgaacgggtatgagggagaccggtgtaccgtcaggcttggacggccattgagcgaggctttaaggtcattaagcattcagatgaaaaatagcgtatttgtgacaatgctgggtgcatttcatctttttctgcaccggcttaccaaacagtcaggccttgtgatcgggatccccgcagcaggtcaatcgcatataaaacagcatgatctgattggaaattgcgtcaatatgattccggtgaagaacacgtctacttcagaaagcactttaaccggttatcttggcagtatgaaagaaagcgtgaatcttgcaatgcggcaccaagccgtcccgataacactggtggccagagagcttccgcacgatcaagtgccggatatgcgtattatctttaatttagacaggccttttcgaaagctgcatttcggaaaggcggaagcggagcccgttgcatacccggtaaaatgcaccctgtacgatttatttcttaacataacagacgcgcatcaagaatatattcttgatttcgactttaatacgaacgtcatcagtccggaaatcatgaaaaagtggggagcgggttttacaaaattgctgcaaaaaatggttgagggagattcaatccctcttgacgccatgatgctgttttccgatgaagaacagcatgatttacaagcactttatgccgaacaccagaagcgggtctcttcaataggaagcaatacagcaaatttcactgaagcctacgaggcgccgataaatgaaacggagcggcagctggcgcggatttgggaggaacttttcggccttgaacgggtcggcagatcagatcgcttcctggctctgggaggaaactcgctccaggcgacgcttatgctttccaaagttcagaagacatttcatcaaaaggtttccatcggacaatttttcaatcaccagactgttaaggaattagcacatttcattcagaacgaaacaaaagtcgtgcacctcccgatgaaggctgccgagaaaaaagcgtattacccgacatcgccggcgcagcaaagagtatatttcctgcaccaactggaaccggatcagctggcgcaaaatatgttcggccaaatatcaataacagggaagtacgatgagcaagccctgatctcatctcttcaacaagtgatgcagcggcacgaagcgtttcgcacgtatttcgacattatagatggcgatatcgttcagaaacttgaaaacgaagttgattttaacgttcatgtccggacaatgagccgggacgaatttgatgcctattcagaccggtttgtaaaaccgttccgcctggaccaagctccgttagttcgtgcggagctgatcaagattgaaaacgagcaggccgaactgctcatcgatatgcatcatatcatttcggatggttattccgtcaacatccttacaaatgaattgctggctttatatcatcagaaaccattaccggacattgaatttgaatataaagatttcgcagaatggcaaaaccaacggctgaatgaggatgccatgaagcggcaggagacatattggctggaacaatttcaagacgaaattcccatccttaacctgccgacagacggttcaaaagcggcagaacggtcttctgagggacagcgagtgacatgctccttacagccggatgtcatccgttcgcttcaagatttggcgcaaaaggcggaaaccactctctatacagtgctcctggccgcctataatgtgctgcttcataaatataccggacaagaagacattgtcgtaggcacgcctgcttcaggaagaaatcatccggatatcgaaaagatcatcggtattttcatacaaaccatcggaatccggacgaagccgcacgccaatagaacgttcacggattatctggaagaagtaaagcggcagacgcttgacgctttcgaaaaccaagactatccatttgaccggcttgtggagaaattaaatgtgcagcgggaaacaaccggaaagtctctgtttaacacgatgtttgtgtttcaaaacattgaatttcatgaaatccggcacaatgaatgtacatttaaagtgaaagaacgaaatccaggggtctctttgtatgatttgatgctcacgatcgaagatgccggtcaacagatagagatgcattttgattataaaccgggacgattcacaaaagacaccattgaacagatcaccagacactataccggcatcttaaacagtcttgttgagcagccggagatgacattgtcttccgttcctatgctgtctgaaaccgaacggcatcaactgctgacggagtgtaacggcacaaagacgccgtatccgcataacgaaacagtaacccgatggtttgaaatgcaggcggaacagagtcccgatcaggaagccgttatttttggcaatgagcggtatacgtacagacagctcaatgaacgggcgaaccgattggcgcggacgttacggacaaaaggcgtacaagcggatcaattcgttgccatcatctgcccgcatcggatcgaactgattgtcggaattttggctgttctgaaagccggcggcgcatacgtgcccattgatcctgaatatccggaagatcggatccaatatatgctgagagattcaagggcggaggttgtgttgacacagcgcagcctgctggatcaattaccgtatgatggtgacgttgtgcttttggatgaggaaaactcataccatgaggatcactcgaatcttgaatcggacagcgatgcgcatgatttggcctacatgatctatacgtcaggttccacgggaaatccaaaaggtgtcctcattgagcatcagggactggctgattatatttggtgggcgaaagaggtttatgtaagaggtgagaaaaccaacttcccattatactcttccatctctttcgatctgactgtgacctcgatatttacaccgctggttacgggaaataccatcattgtctttgacggcgaagacaaaagcgctgtgctttctgagattatgcgggactcaagaatagacatgatcaaattgaccccggcacatctgcacgtcatcaagaagatgaatatcggtggcggcaccgcaatacggaaaatgattgtcggcggagaaaatttaagcacccgtctggccaaaagtgtcagcgagcagtttaaaggccggctggacatttttaatgaatacggaccgacggaagctgtcgtcggatgtatgatttatcacttcgacgcagaacgggacaagcgggaatttgtaccgatcggcactccggctgccaatacggatatttatgtggccgatgcaagcagaaatctggttccgatcggggtaatcggcgaaatatatatcagcggaccgggtgttgccagagggtattggaaccgtccggatttaacggcagagaaatttgttgaaaacccgtatgtcccgggagcgaagatgtacaaatcaggggatttggctaagcggttgaaggacggaaatcttgtatatatcgggcgcattgatgaacaagtcaaaatcaggggacaccgaatcgagcttggtgaaattgaagcagcaatgcataacgcggaagcggtgcaaaaagccgcggttacagtgaaagaagaagaagacggcttaaaacaattatgcgcgtattacgtaagcgacaagcctatagcggctgcgcagcttagggaacaattgtcatcggagcttccggactacatgattccgtcctattttgtccaactggagcatatgccgttaacgtccaacgggaaaataaaccgtaaggcactgccagcaccagaagcgagtctgcagctgacagctgaatatgttccgccgggtaatgagacggagtccaaactgacagatttatggaaggaagtgctcggaataagccatgcggggatcaaacataatttctttgatctcggaggcaactccatccgagcggctgccttagccgccagaattcacaaagagctggatgtgaatctgtctctaaaagacatattcaagtttcctaccattgaacaattggctgacaaggcgttacacatggacaaaaaccgatatgtaccgattccggctgcaaaggaaatgccatattatccggtttcttcagctcagaggcgtatgtatttgttaagtcacacagaaggcggcgagctgacttacaatatgacgggtgccatgaatgtggaagggacgatcgatcccgaacggttaaacgccgctttccgaaaattaatcgcgcgtcatgaagcgttgcggaccagctttgatttatatgaaggcgagccggcacagcgtattcatcagaacgtcgactttacgatagaacggattcaagcaagcgaagaagtagcggaagaccgtgtgcttgatttcatcaaagcgtttgacttagccaaaccgccgctgatgcgggccggactgattgaaattgaacctgcacggcacgtgcttgtggttgatatgcatcatatcatttctgacggcgtgtccgtcaatattctgatgaaagatttaagccgaatctacgaggggaacgaaccggacccgctctctattcaatataaagactttgcagtttggcagcaatcggacattcagaaacggaacatcaagagccaggaagcgtattggctggatcagtttcacagtgatattcctgtactggatatgcctgcggattatgagagacctgccatacgcgattacgaaggcgaatcatttgaatttcttatacccgaacacttgaaacagcgtttaagccaaatggaagaagacacaggagcaacactgtatatgattttattggcggcctatacgattcttttatccaagtacagcggacaagaagatattatcgtaggaacgccatctgccgggcggactcatttggatgtagagccggtcgtgggaatgttcgtcaatacgttagtcattcgcaatcacccggcgggccgtaaaacatttgatgcctacttaaacgaagtaaaagaaaacatgctgaacgcctataaaaatcaagactatccattggaagaattaattcagcatctgcatcttccaaaagattcaagccgcaatcctttattcgatacgatgtttgtgctgcaaaatctcgatcatgctgaattgactttcgattctcttcaactcaagccgtattcatttcatcatccggttgccaaattcgatttgaccttgtcgattcaggcggaccaagacaactatcacggactgtttgaatattcgaaaaaactgtttaagaaaagcagaatcgaggttttatcaaacgactacttacacattctatcggcgattttggaacagccaagcattctaattgaacatatcggattgagcggcagcaatgaggaagaagagaacgcgcttgattctattcaattgaacttttagggaaaagcattatttctttaaattatataaaatgaggtgctccaatgtcggtatttaaaaaccaagaaacgtactgggaaaacctgtttgatgaagaagacggattaagcgcattcccttactttaaagcagcggataaagcgtcgtttgcccgtaccggctaccaggaaaaatgcatctgccgttccttatctccggaagtatctcaaagaatcatgacaatggcgaatcattccgatatggcggcctatctgattttattggcgggtattgaatgcttgttatataaatatacggatcaaacgagcctgattcttggcattccgacggtatcgaagcaaaaagccggccagtcagccgttaacaacattgtcctcttaaaaaatacgctttcaaacgagagtacatttaaaaccgtattcgggcagctgaaagaagccgttaatgattctctgaaaaatcaaaacctgccgtttagaaaaatggttcagcatctgagcgtgcaatacaatgacgagcatctgccgttgattcataccgtcgtttcgcttaacgaaattcattccttgcaatttaaagaagatactgcagccgatacgctgtttcactttgatttggagaacaacgggattcatttgaagcttttttataacggcaatctgtacgatgagcgctatatcaatcaaattgtgtcccatttggatcagctgctgtctgtgattctgtttcagcctcaagccgcgatccatacggcagagatcttaccggaagcggaaaaacagaagctattgtttgattttaacgacaccgtcagagatttctccgggagcagaacagtctatcaattatttgaagagcaagcagaaagaacgcctgagcatgcggccgtcaagtttaaaaacgaccatttgacgtacagggaactgaatgagaaggcgaaccgtttggcaagaacattgcgtaattgcggggttcaacccgatacgttagtcgccattctcgctgatcgttcattagagatgatcgtatccattatagccgtttggaaggcagggggcgcttatgtgcccctggatcctgaatatccaaaagagcggcttcaatatttgcttcatgatgcggatgcagacgttctccttgttcagcgtcatttaaaaaacagtctcacctttgacggcccggtgattgatttgaatgatgaaacatcataccatgccgatagctcattgttatcaccagcaacgggacacagccatttagcctatgtcatttatacgtcgggtacaacaggaaagccgaaaggagtcatggttgaacacggcggcattgtgaattcgctccaatggaagaaggcgttttttaagcattctccggcggatcgcgtgcttgtcttgtacccgtatgtttttgatgcgttcattttaaatttcttcggcccgctcatctcgggggcaactttgcacctattgcctaatgaagagaataaagaaactttcgccattcaaaatgccataaaacaagagagaattactcatttctcaacttctccccgtcttctgaaaacgatgatcgaacagatgaacacagaggacttcatccatgttcagcatgttgttgtaggcggtgagcagctggaaacagatacagttgagaagctgcattctctgcagcctcgcattcggatcaataatgaatacggaccgacagaaaacagcgtggtatctacatttcaccctgttcagtccgctgatgaacagatcacaatcggcagcccggtggccaaccatcaagcttatattttaggagcgcaccatcaaatccagccgatcggcgtaccgggagagctgtatgtcggaggagcgggagtggcccgcggctacctcaatcgtcctgaattgacggaggaaaaatttgtggagcatctgcatgtccctggtcaaaagatgtataaaacgggtgatctcgccagatggctgccggatggaagaatcgaatatttagggcggattgatcatcaagtgaaaattcgcggctaccggattgagatcggcgaggtagaggcagccatgttcaatctggaaaacgttcgtgaagccgcagtcgtcgcgcgggaagacgcagacggggccaaacaattgtatgcctattatgtcggcgggccttctttgaccgctgcgcagttcagaaaagaattatcccgggaactgccgaattatatgattccctcccgctttatcccattggaacgcattccgctcacttccaatgggaagattgatctgaaagctttgcctgctgctgacgaaaatacgcgggcggaatacgaatacatagccccgcggaacacaatagaagaactgctggcgtctatctggcaagaagtattaggggcagaacgtataggaattctggataatttctttgattttggcggagattcgattaagtcaattcaggtgtcatccagattgtatcaagccggatacaaggttgatatgaagcatttgtttaaacacccctcgattgctgaacttagtcagtttgtagcgccggtcagcagggtggctgatcaaggagaagtgaatggcggaaccaagctgaccccgattcagcattggttttttgaacaaaacatgccgcatgcacaccattacaatcaggccgtcatgttatattcggcggaaagctttaaagaggctccgcttcgccggacgatggaacagatcgcgtcgcatcacgatgccttgaggatgatttttgaaaaaacgccggatggatacgctccgcgaattacaggaacagatgaaagtgaactataccatctggaagtgatgaattataaaggggaaaccgatccggctcaagcgattgccgataaagcgaatgagattcaaagcagcatggtattagacaaagggccattgatgaagctcggtttgttccaatgtccggacggagatcatttgctgattgcaattcatcatttgctgattgacggagtatcctggcgtattttgctcgaagattttgcaagcggttatgagcaggcagaacgcggacaaacgatccagctcccgcaaaaaacagattcgtttccattctgggccgatcaattgtccaaatatgcggcggaaaccgacatgaaagaggagattgcttattggactgagctttcaagcataaagcctcagccattgcctaaggacactatcagcgaaggatcgttattaagtgacagcgaagaagtgacgattcaatggacaaaagaggaaacggagcaattattaaaacaagcgaaccgcgcctacaacacggatatcaacgatctgctgctgacttcgttagggctggctgttcacaagtggacaggcacggaagacattgtcgtgaatttggaaggccacgggagagaaccgattattccggatgctgacatttcccgcacgataggatggttcacaagccagtaccctgtcgtcctgaggatggaagccggaaaagacctgtcgcagcggatcaagatcgtaaaagaagggctgcgccgcatccctgataaaggaatgaattacagcatcatcaaatatatatccgggcatccggaagccgacagcatgcagctgaatccggagatatcgtttaactatttgggacaatttgaccaagacctgaagcatcaggctttgcgcatatcgccatattccacagggttatcgatgaacgaaaaccaagagagaacggccgtgcttgatttgaacggcatgattgccgaagggacattatcactgacactgagctacagcagcaaacaatacgaaagatctactatggcgcaatttgcccaagggttgaaagaaagtctgcaagaagtcattgcgcattgcgtaagccggcagcagacttctctcacaccaagtgacatcctgttaaaagatatctcaatcgacgaactggaacagcttttggagcagacgcgtgaattaggcgaagcggaaaatatttatccattaacgccgatgcagaagggcatgctgtttcacagcttatttgatccgaattcaggtgcttattttcagcaaacgatgtttgatctgcatggagatctggagattgattcattttcaaaaagcttggacggcttatcgcaaaaatatgatattttccgcacgaatttttacagaggctggaaggatcagccgctccaaattatattcaaaacgaaaaaaatcggttttcaattcaatgacatacgagagatgaaggaatcacaaaaagaagcgatgattcagcagtatgccagagaagataagatgcgggggttcgacttagaaaaaggcgcgttaatgcggctattcatccttcgtacggatgaaaagacataccgttttatctggagcttccaccatattttgatggacggctggtgcctgccgctgattacaaaagaaatattcgagaattactttgccttgcttcagcaaaagcagcctgaacaatcatcaattactccgtacagtcaatatattgaatggctcggccggcaagatgcgaaaaaggccacggcttattgggatcaatacttggagggatatgaggagcaaaccggccttcctaaggatcaccatgcagcggaagacggacgatacgttcctgaaaaagtgacgtgtgacataagctccgatctcacttcgaaaatgaagcggacggcaggccagcatcatgtcacgctgaacacgctgctgcagacggcatgggcggttttgctgcagaaatataaccgcagccgggacgttgtgtttggaagtgttgtatccggaagacctgctggaattccaaacgtggaaaccatgatcggcttattcattaacaccattcccgtccggttccggtgtgaagccggaacaacgtttgccgagcttatgaaagaggcgcaagaaagggctgtagcgtctcaacaatttgagacgcacccgctgtacgatattcaagcgcgcacaacgcaaaaacaagatttaattacacatttaatgatattcgaaaattatccggttgatcagtatatggaaagtataggccgccagaacggaacatccatcacgatctccaacgtgcaaatggaagaacagaccaactacgattttaatttgaccgttataccgggcgacgagatgaccatctcttttgaatacaatgcaaatgtgtatgatcgggcaagcatagagcgggttcgggaacatttcatgcaaatcctgcaacaagtcgtgacaaatgcggatatccgggtggatcaagcggaattgttaacggaaggcgaaagaagaacccttctgcagacgcttaacgacacggccgcgccgtttccgcagacgccggttcatcaattatttgaagagcaatcgcagcgtacgcccgatcaagcagccgtcattgataaggacaggcagctcacgtacggagagctcaataagcgggccaaccgactcgcgcgaacgttaagagcgaaaggagtccagacggatcagcctgtagccatcatcacgagaaacagcatcgaatcggtggtcggaatccttgccgttttaaaatcagggggagcctatgtccctatagatccggaatatccgcaagaccgcatacggtatatgctggatgactcccaagccggaatcgttttaatgcagcgggacgtcaggaaacagcttgcctatgaaggcgtcacggttttacttgatgatgaaagttcttatcaccaagatggctctgaccttgctcagataaatgatgtgagccatttggcatatgtcatttatacgtcaggttccacaggccggccgaaaggcgtactaatcgagcaccaaggcttgaccaattatatttggtgggcgaaagaggtttatgtaaaaggcgagaaagccaacttcccattgtattcgtcaatttcttttgatctgacggtgacttctattttcacgccgcttgtcacaggaaatgcaatcatcgtctatgacggagaagataaaacagctctgcttgaatcgattgtgcgagacccgagggtggatatcattaaattgactccggcccatttgcaggttttgaaagaaatgaacattgccgatcaaacggctgtccgaagaatgattgtgggcggggaaaacttaagcacccggttagcccgcagcattcatgaacagttcgaaggccgggttgaaatatgcaatgagtacggaccgacggaaaccgttgtcggctgcatgatttaccgttatgatgccgtaaaggacagacgggaatcggtaccgatcggaaccgctgcggcaaacacgagcatttacgttcttgatgagaatatgaaacccgcgccgatcggagtgccgggagaaatctatatcagcggcgccggtgtggcaagaggatatttgaaccgtcccgaattaacggcagagaaatttgtcgatgacccgtttgaacccggagcgaagatgtataagaccggagatttggcgaagtggctggcggacggaaacattgaatatgcgggcagaatagatgaacaagtgaaaatcagaggttatcgtatcgaattaggcgagatcgaggcggcactgcttcaagaagaagcgatcaaggaagctgtcgttacagccagagaggatgtccacgggtttaaacaattgtgtgcatattacgtaagcggcgggcaaacaacggctgcccggctccggaaacaattgtctcatacccttgcaagttatatggttccggcttattttatcgagcttgatgaaatgcctttaacttctaacggaaaaataaacaaaaaagggctgccggctccggatttcgagctgcaggacagagcagagtataaagctccccgaacaaaagcggaagaaatattagtttctgcctgggaatcggtattaggcgctgaaaacgtcagtattcttgataatttctttgaccttggcggagattccattaaatccattcaagtatcctccagattaaatcagcaaggatacaaaatggaaatcaaagacttgtttcaatatgcaacaattgcagaattgagtccgcatatcaagcagaatctgcgtatagccgatcaaggtgaggtcaaaggaaaagtcagcctgactcctattcagcattggtttttcgaacaaataacgacagatcagcattattataatcaagccgtcatgctgcatgcgccggaaggttttcaggaaacgcagcttcgtcaaaccctgcaaaaacttgctgaacatcacgatgcgctccgcatgacgttccggactacggaaaatggctgcgaggcacagaatgaagaaatcgcccaaagcggactgtaccgcttagaagtcctgaatctgaaagaagattccgatccgggacggacaattgaagccaaagctgatgagatacaaagcagtatgcgtttaagtgatgggccgttaatgaaagccgggttgtttcaatgcgcaaatggagatcatctgctcatcgccatccatcatttgattatagacgggatttcatggcgcattttactggaagatatcgttagcggctacaagcaagccgagaatgggcgagtgattcaactgccgcaaaaaacagactctttccaattatgggctaagagactttcagaatatgcgaaaagtgaaaccataaaacaggaacaggaatattggacaaagatcgaacaaaccgaagtcaaaccgctgcctaaagattttcatgaaacccatacaactgcaaaagacagtgaaacagcaactgtggaatggacgaaagaggaaacggagctgctattaaaacaagcgaatcgcgcttataacacggagataaacgatttgcttttaacttctctcggtctttccatatcgcattggtcaggactgaaacaaattccgattcatttagagggacacggccgagaacagattatacaagatatagatatctcccgcacggtcggatggtttacaagtctgtatccggttgtgctgcacgcgcagccgggcaaagagatctctgattatatcaagacgaccaaagaaggattgcgccaaattccgcataaagggatcggatatggaatagcaaggtacttaagcggcggaatgccatcgaaactcaatcctgagatcagctttaactacctgggacagtttgaccaagatttacagcagcatggggttcaattatcttcttattcttgcggttcagactctagcggaaatcaagaaagaccgtatgtattgaatataaacggaatgatcaccgacggccggctgaagcttacgatcagctacagcagcaaacagtacgcaaaagaaacgatcatgcggttatcggaaacgattcaaagccgcctgcggacaatcattacgcattgcgtccatagagaacaatcggaactgacgccaagcgatattttgttaaaaggcatgtccattgacgaattggatcagctcctcattcaactgccgcatgcaggtgaggttgaaaacgtgtatccgctcactccgatgcagaaaggaatgctcttccacagcctgctggacgaggcctcaagttcttattttgaacaagcatcgttcgatttgcagggagaattaaagattgattggtttaaagcaagccttgaacgattatttgaaacatacgccgtgctcagaacccgtttttacagcggctggaacgatactcctttacaaattgtctataaaacgcaaacaccgcaaattcattttgcagatttgcgtgatatagaggagcacctgagagaggatgcaatcgcagcctatcaaagagaagataaggcaaaaggatttgacttggctcgggatccgctgatgcgcatagcgattttccgtatggaagaccgcaaatatcatttgatttggagcttccatcatattgtgatggatggctggtgcctgtctcttatcacgaaggaagtgtttgatcattatcgcgccttacaagaaggcagggaaccagaaccgtcatcggcagctccttacagcaactatatcgagtggcttgaccgccaagatcagggagcggcaaagcggtactggagcgggtatctcgaaggatataaaggtgaaaccacgcttcttcataaaatagagcagcatgaacaaaaagaatacgcctatgccaatgtgacctgccgatttgatcacgaacagacaaaacaattacagcagatcgcaaatcagcatcaggttacattaaatacgttgatccaaacgttatggggagttttattacagaaatacagcgggtccgcagacgttgtcttcggcagtgtcgtgtcgggaagaccggcggaaattcctgatgtggaacagatgatcggcctgttcatcaataccattccggttcgcatccgctgcgatgaggacagcacttttgctgatacggtgcaaatggttcaacaaaacgctctggcttcccaatcatacgatacctatcctttatacgaaattcaggcccaaacggaacaaaagcagaacctgattgaccatatcatgatttttgaaaactatccgatcggtcagcaggtcgaagagacgggacatcatagtacggagctgaacattacgaattttcatatgctggaacactcccactatgatttgaatgtagttgtcatacctggcaaacagctggccgttcatttcggttttaatgaaaacgaatatgaaaaatcagaagtggagcggatctgcggacattttgaacagctcatgcagcaagtattacagcagccgtctgtcaaaatagaagaattggagcttctctctaggcaagaaaaagaacatttgctcagccgctttcagtctaatgacatgcattacccgcttgaacaaacgatacatgagctgtttgaggaacaggcgcatcgtactccggacaatacagcggttgtattcgagggtaaacaactcacctacggagaactgaaccggcgtgccaatcagcttgcgcgaaccttgcaggcaaaaggtgtgcggaacgataagcttgtcggtattatgactgaacgctcgcttgagatgattgtaggcatcttgggagttttaaaagcgggcggcgcatatttgccgatagatcctgattctccgtctgaacgcatcagttatattttaaatgattcaagcatcagcgtattgctttaccgcgggaagctgcaggatgacatcggcttctcaggaacatgtatcgatctcatggaggaacatttctatcaccaaaaagacagcagtcttgcactctcttatcagtccagtcaactggcctatgccatttatacttccggtacgacaggcaatcctaaaggcacgttaattgaacatcgccaggtcattcacctgattgaaggacttcgacgccaaatttactctgcctacgatgcggagctgaatgtagccatgctcgctccatattatttcgatgcttctgttcagcaaatgtatgcttccttgctgtcaggacataccttgtttattgttccgaaagagattgtgtcagacggtgctgccttatgccgttattatcggcagcattcgattgacatcaccgacggaacacctgcccacttaaagcttttgatagctgcaggtgatttgcagggagttccgcttcagcatcttttaatcggaggagaggcactttccaaaacgacggtaaataagctcatgcaattattcggcgatcatggcgcttcacctgggattaccaatgtatatgggcctacggagacttgcgtagacgcgtctctgttcaacattgaatgttcttccaatgcgtgggcacgcagccaaaactatgtccctataggcaagccgttaggcagaaaccgcatgtacattcttgattcaaaaaaacggctgcagccggcgggcgtccaaggcgagctgtatattgcaggggacggcgtcgggcggggttacttgaacctgccggaactgacggacgaaaaatttgttgccgatccgtttgtaccggaggaccgaatgtacagaaccggtgatctggcccgccttctgccggatggaaatattgaatatatcggccggattgatcatcaggtgaaaattcaaggttttcggattgaactcggtgaaatcgaatcggtgatgctgaacgttcctgatattcaagaagccgccgcagctgcccttaaagatgcagatgatgaatattacttgtgcggatactttgctgcggataagacaatacagatcagtgaacttcgcgaaagaatggcccggcatttaccgggatatatgatcccggctcaatttgtgcagctggataagatgccgctgacgccaaacgggaagttgaatcgccagttattgccggctccggtcaaaaagcgtgacggcggcatagagtacgtcccgccgcaaacttcggaagaaatccagctgacagcaatttgggaagatgtcctcgggttagagcaggtggggatcagagatcacttttttgagatcggcggacactccctgcgggcaacggcgctgattgcaaaaatacaaaagcaattgcatgtccaaattcctttgcgggacgtcttccgtctcccaaccattgaacagctcgcacagacgatcacgaagacggagctgaccggatatgctgcgattcctgcaattgaaaaaagaccttattatccggtatcctcagcacaaaaacggttgtacatcctgaatcacttggaaggcggagaactcagttacaacatgctgggactgatggctgtcgaaggcaagcttgaccgtgacaagctgcagcaagccttccgcacgctgattttgcgccatgaatctttgcgcaccggttttaaaatggctgacggagaacccgttcagtatgtcttagatcacgcaaagttcgaagcagagtggtatcaggcagaagaaaatgatgcggacctttatatccgcaaatttattcgtccatttcatctggatgagccgccgctgcttcgcgtggggctgattgaacttcaacctgaccgcggaattctgatgtttgatatgcaccatattatttctgacggaacatccatgagtgtattgattaaagaatttatccgcatttatgaaggagaaacattaccgcctttgcgcatccagtataaggactacgcagtatggcagaccggcgaagcgcggttaaaacagatccaaaatcaagaagcctattggttagagctgtacagcggcgacgttcctgtccttcatctgccgaccgattatatccggccgtcggcacgggattttgcgggagccacaatgcagtttacgcttgataagcaaaaaagcgccgggttaaagcagctggcatcccaaactgaatcgactttatatatggtgctccttgcgtcttatacattattgctttcaaaatacagcggccaggaagacataattgtcggcagtcctatagcgggaagaccgcacgccgatttggaaccgattatcggaatgtttgtgaatacattggccatgagaaattaccctgaaaaagggaagacgttctctcagtatctgtccgaggtgaaggagaatgcattaaaagcttatgagcatcaagattatccgttcgaagcgctgatcgatcaactgaatatcgcaagagacttaagccgtaatccattgtttgacaccatgtttgtgcttcaaaacacggagcaggaacagttagagataaatgacgtcactttcaaaccatatccaagcgaacatacgatggctaaatttgatttaaccttaacggctgtggaagaagagtcgggtattcagttcacaatggaatacttgacggctctgtttaaaccggaaacgatcgaacgcatgatggggcattttgtgcagctgattgattcgattattaaacagcctgatgccgagctggctcgtctgaatatgatgaccaaggaagaggaaggagacattcagcaactctttaacgatactgcagttgcggaaaaacgaattccgacaacgattcatcagctttttgagcagcaggctgagcttaacccggatcatgaagccgtcatgtttggaattcagacactgacttatcgtcagctgaatgagcgttccaatcagctggcgcgcatccttcaagataagggggcctgcactgatcaggttgttgccgttctcacggatcgctcagcacatatgatcatcggcattttagccatattaaaggccggcgcagcatttcttcctattgatccggagcttcccgaaaaacggcgggcttttatgctgaaagacagcggcgccggtgtgcttttgacttgtgcaggccacgctattccgccgcgctttgaaggagaagtgcttcagcttgatgatccgatgatatatcaaggcagagcagacaatcttaatctttcctgctcggaaaatgatttaatgtatgttatttacacgtcaggcacaacggggcagccgaaaggagttcagctggagcacaagacgatgacgaatctgctcgcttatgagcaggatcatacgcagcttcgctttgacagagtgctgcaatttgccgcgatgagctttgatgtctgctatcaagaaatgttctccgcgctttcaagcggaggaacactctttatcatcggcaatgaggcaaaacgtgacatacgtcagctcaatgattttgtcagaacgcacgggatacaaacagcattcctcccgacagcgttccttaagctccttgcctcagagaaacaatatttcgaaccgtttgccgcgtgcgtggatcacatcatcgctgcgggagaacagctcatcgtaacaagtatgctgcgtgacatgctggcacgccatcaagtcacattgcataatcattatggcccgtcggagacgcatgttgtgaccatgtataccgtcgatcctgatacagatcaggagcttcagccgatcggcaaaccgatttcaaatacggagattttcattttgaatgaagccggaacgcttcagcctgtcggaatcgtcggtgaactttgtatttcaggagcgagccttgccagaggctatcataacagggagcctttgacactcgaaacttttgttccgcacccatatgactcgaatcagcggatgtataaaacaggcgatctggcccgttaccttcctgacggaaacattgaatatgcgggaaggagagaccaccaggtcaaaatccgcggttaccggattgaactcggtgaggtggaggccgctcttctcaagcacgtacaggaagcagttgtcctatcaaaagaaaataccgatggccaaatcgatttatatgcctattttacagcggagcaatcactctcgatcagtcagctgaaagaaaaacttgctggccaaataccgggatacatgatcccttcatacttcatccagcttgagaaactgccgctaaccggcaatggaaaagtaaatcgaagagcattaccgatgcctgaagcaggtttacaaacgggaaccgactacgttgctccgcggacgaatatggaagagcagctgatatgcatctggcaagacgttttgaaggtaaaagaaataggtgtaaaagataactttttcgatttgggcggccactcgttgcgggggatgacgctcatcgccaaaattcataagcaattcagcaaaaacatttcattaagagaggtctttcaatgtccgacagttgaggaaatggcaaaggcaattgcaggagctgaaaccaacgggccggattacattccgaaagccaaagcaaaagatgtctatcctgtatcttccgtgcagaagatggtttacctgtcaacacaaatagaaggcggagaactgagctacaatatgccgggaatccttacattagaaggaaaactcgacataaatcgcttgcaaaccgctttccaaagactgatccagcgtcatgaatcactgcgtaccggttttgagctggtccgcggagaaccggtgcaggtgatcaaaccgcaagcggagttttcgatggaaagatacaaggcaacagctgacgaggttgaggaatgtttccgcaccttcgtgcggccgttcgatctcagccaggctccattactcagggccggactcatcgagttagaacaagacctgcatattttcatgtttgacatgcaccacatcatcacggacggcgcctccatgaatatttttgtcgaagaactgattcaattgtatgacggcaaagagttagctccgctccgtattcagtacaaagactttacggaatggaaacatcaaaaagagcaaagagaacgaatcaagaagcaggaagggtattggcttggtgtatttcatgaagagctgccttcatttgagctgccgaaagattttgcgagaccgccggttagaagctttgatgggaaaaggcacaattttacgctcgataagactgtcacccaagggataaagcagctggaagaattgaccgggacgacagcttacatgattttgttctcggcctattccatactgctggctaaatacagcggtcagggtgatatcgtcgtcggcacacctattgcggggagaccgcatgcggatttggaacccattatcggaatgtttgtcaatacattagccatccgcaccgctccgatggcggaaaagacatttttggattatataacggaaacgaaagaaaccatgctgaaggcttttgaacatcaagagtatccttttgaagaattagttgaaaaactgggtgtaaaacgggacttaagccgcaatccattgtttgatacgatgtttgtcctgcaaaatacggaacaaacggatattgaagtggactctctcgcagtcaggccttatgaacaaacagagacggcagccaagtttgatttacagctgaacttcttaatagatcaagatgagattcagggcagttttgattactgtacaaaactgtttaaaaagaaaaccattgctgtattggccaaggattacgtcatgatcctttcggcgattatgagaaacccatccattcctttaaaagacattcaattaagcgaaaaagtaaacaaaagtaaacatctcgcaagcacaatcgaattggatttctaatcacgggggcagcggctgtcccggcatgaatgccgcggctgccgccagctgcctgaaaacaggaatgaaaccaactggagggatatgaatgtcagaattcaaacaacaggagttgttctggggccgaatgtttcacacggaagaccgtcccggtgcattcccttcgtttcaagtgtccgactcaacagtaaagcgtgatataacaagcggatctgactgtattcacagttcattgagtgcggaggtatcacggcgcatcctgaccatgacgaaccaaacgccaatggccgtctatctggttctcctggtcggaattgaatcccttttatacaaatacacgggggatgagggagtgattacaggggttccagcctttgaagacgaaactgatgaagatcttcgttcagaccagctcatgttaatcaaacagcagatcaattccggcagtacgtttaaatcaattttccatgaattgaaacatacgctggacgaagcgatcttatatcaggacgttccctttgataaaatggccggacagctgaggctgaactacaatgcaaatcatttgccgatcatccatacagttgtttcactagagcaaattcattctgatggtttcatagaaacggctgctgcagatgctttatttcagtttgctatgggtgaagacttgattgacctaaaattatgttttaatgaacaagtctatgaccgtcagtatatgatgcaggtgctcggacatttaaaccggctattttctgtcatattatttcagcctgacctcccctcggccaagtggatattttgccagaatcggagacacatacacttctcgttgacattcaaactgcgaaaactgaatatccgcgggataagacggtttatcagttattcgaagaacagatgaaacgaacaccggatcaagcagccgttatttacggagaaaagcaattcacatatcgtcagctcaatgaacgtgccaatcaattagcccgaacgttaaggaaaaagggggtaaagacggaccggctcactgcgattatttgcgagcatgagatcgaactggtcgtgggaatattggccgttttaaaagcgggaggggcctatgtgccaattgatccggattatccgaagcatcgcatacagtatatagcagaagactcccaagctgatatcatcctgacgcagagccatcttcaaaaacagttggaacttgcgggcacaatggttttcctcgatcaggaaagctcttaccacgaagacggctctgacctggaaccgatcagcagtacgaaggatttggcttatgtcatttatacgtcaggctccacaggcaagcctaaaggagtggcaattgagcatcagggcttaaccaattatatttggtgggcccgccgggtctatgtcaaaggggaaaaaaccaactttcccctatattcgtccatcgcttttgatctgacgataacgtctgttttcactccgctaattacaggaaattccattattgtctacggaggagaaaacagtgctgccttgcttgattgcattattcaggattcaaggacggatattatcaagctgaccccggcgcacttgcagttattgaaagagatgaatatccctgctgagtgcaccattcggaaattcattgtcggcggtgacaatttaagcacgcggctcgcccgtagcatcagcggaaaattcggcggaaaaatcgaaatttttaacgaatacgggcctacagagacagtcgtcggctgtatgatttattcctttgatccgcaaaacgacagacgggaatcagtgccgatcggaaccgccgcggacaacatgaacattttcgtgctggataagagcatgaagccggtgccggccggcgttccgggagaaatctatatcagcggggacggcatcgccagaggatacttgaacagagcggaattaacagcagaaagatttttgcagcacccctttgtgccagaggtgaaaatgtaccggacgggagatttagcaaggcggctcccggatggaaatattgaatatttaggccggatcgaccaccaggtgaaaatccgcggttaccgcattgaaatcggggaagtcgaatccgcatttttccaaataccgccgattcaagaagctctcgttacggcacaagaaaccaacggggaaacatccttgtgcgcctattataccgcacagcattctttaaccgcaggcgaaattcgggagcgcctgtcccggcaacttccgtcctatatgatccctgcttattttgtacagctggcagcgatgccgcttacttccaacggaaaaatagatcgtcaggctctgcctgctccaacgggaaatctcactggaaatccttatacagctccgcggacagaactggaaaaaatactggccggggtgtgggaatcggtattaggcgcagaacaggtcggaatcgatgatcatttctttgagctgggaggagattcgattaagtcgattcaggtgacctcaagcttatatcaagccgggtataagcttgacatcaaacacttgttcaaacacccgacgatctccgggcttgctccttttattgagcccattacccgaatcgcagaacaaggggagatcaaaggccgtaccttattgacgccgattcagcattggtttttcgcccggcaataccctgatccgcatcattataatcaatctgtcatgctttattttaaagggggtttggacgaatcgaagcttcagaaagtcatgaagaagattgccgagcatcacgatgctttgcgcatggtctatgttcagggagatcatgaatacgaagccagaacccgcgggatcagtgaaggagaattattcagcctcgacgtgttctctttactcgaagaaaacaaccctgccgaaacgatagaaacgatagcaaatgacattcagcaatccatccatttagccgatggaccgctcatgaaactgggattgtttcaatgtcaggatggcgatcatttgctgattgcgattcatcatctggttgtagatggcgtatcgtggaggattttacttgaggatataacgtcagcttatgagcagctccaaaacggagaagcgctcacgctccctaagaagacggattcctatctgttatgggctgaacgattgaaacgttatgcagaaagtccggaatttgaagcagaaaatcaatattggcttgagcagaaacatatctcgcaacacaaattgccaaaggataatgagcaggagaccggtctggccgaagaccgggaaacgatcatcgtccaatggacagaggaagaaaccgagcatttattaaaaaaatcgaacagggcctatacgactgacattaatgatttattgctgaccggactcggaatggctgttcatcgctggacggggcatgaagaaattcatgttcatctggaaggacacggcagggaatctatttttcaagacgttgatatttcacgtacagtgggctggttcacaacccaatacccggtttctcttcaaatccaggcagaccgggacatctcccagcggattaggacggtgaaagaacagctgcgtcagattccccaaaaaggaataggatatggcctgatgaaatattcgtccgatcatccgaaggcatcagaatggaccggacatccggaaatcagcttcaattacctcggacaatttgatcaagatctcgaaaatggaggaatcgaagtatctccttactccggagggaaaattgcaagcgacagacatcccattgcctatacgcttgacattaacggcatgatctcagacggccggctgtcattggccatcagttacagcggtaaacaatatcgaagagaaacgatggaaacatgtgcagctctcttaaagaacagcctaaaagaagtcatcgaacattgcgcagctcaagaagacattcacctgacgccaagcgatatctcactgaaggacataacaatcgaggaattagatcaatttgttcagcaaacacaacatatcggcgagattgaaaatatatatccattaactcccatgcagaaaggtatgctgttccatagtttaatcgattcggcttccagagcttactttgaacaagccgtttttgatctcaaaggcggcttggatatcgaggcatttacaatgagtttgtcgcagctggcggaaagacatgagattctccggactcatttttatacggaatggaaagatcagcctttgcagatcgtattccgaaaaaaaccgatcgaaataactgttgaagatattcgaagcatgaagaataaacaacgaaacgagttcattgccggctttgtacaaaaagataaggcaagaggattcgaccttatccaagatgcattaatgcgcgtatcaatccttcgtacagaggatgaccaagtccgattgatatggagcttccatcatattttaatggatggctggtgtctgcctcttattacgaatgaagtatttgaaacctattatgcgattcttgatagaagaaaagcggagcgggaagtcgtcaccccgtacagccgatatatcgaatggctggaagaccaggatcataagcacgcttcagcctattggcaaaaatatttggacggttatgaaggacaaactgttttactgaaagaacctgtctcaaaccaagccaagggatatcaaaaacaaaggcttgcatgccggctcggaaaacagctgtcagaagaaatcagacagactgcaagcaagcatcacgtcaccgtgaatacgttcattcaaagtgcgtggggactattgctgcaaaggtacaacaacagtcaggatgtcgttttcgggtcggttgtatccggccgcccggcagaaattccgggtatcgagtccatggtcggcttatttatcaacaccattcccgtccgtattaccgctcagcctggaatgactgtggaacaagtgttgaaaatgagccaggagcaggcattggcttctcaagggtatgatacatttccgttatatgaaattcaggctcaaactgaacaaaagcagcagctgatcagtcatatcatggtatttgaaaattatccggtcgagaaacaaatggagcatatgaaaccgaatcgtgacgcactggacattatcaatttccatatggaagagcatacccattacgatttcaatttcattgtcatgcccgcgggagaaatcgacattcattttgtatacaatagcaacgtctatgatcatgcaagtgtcaagcggatggaagagcattttatgcaaatcattaagcagatggtgaacagtcaggcgattcgcgtccaagacttggatatacttacgggggatgaacgttcgctccttatagaggcatttaatgatacggaagcagattatccaaaggaaaagacgcttcataaattgtttgaggaacaagcacagcgtacgcctgatcaaacggctgtcgtatacggggaaagccagctgacataccgggaactgaatgaaagagccaatcaacttgcccggacattgcaatcagaaggcgtgcagccggatcagccggtcgggattatggccgaacgttccttggaaatgatcgtaggactcttcggaatcttaaaagccggcggcgcgtatgtgccgatcgatccgagctatccggaagaacggattcactatatattggaggattcggatacgaagctgttgttagtacagagtcacttgaggaaaagcgtgccttttacgggaaaagtgcttgacctggaagatccgcgattctcttgggaagatggttcaaacttgaaacagactgccggaccgaatcacttagcttatgttatctatacttcgggatcaacaggccgaccgaaaggggttatggtggaacaccgatccgtaatcaaccgtctcgtttggatgcagaaacattacccgctggataagcaggatgtcattctgcaaaaaaccccaatcacctttgatgtatcggtgtgggaattgttctggtggtcgatgactggttctaaagcggtattgcttccaaacggaggagaaaagaaccctgacgtcatcttagatacgattgcgcagaaaaatgtcaccattatgcattttgtgcctgcgatgctgcatgcttttcttgagtccatggagcaaaaatccgacgaggaattaaagagaaagctggcatcattaaaatatgtatttgcaagcggcgaggctttgacgcctgcgcacgttgcggggtttcatcgcttgatcacaccggcgggtgaggctcaaatcatcaatttatacgggccgaccgaagcgacgatcgatgtatcgtattttgaatgcgaagcgggagaaacgcttaactcagttccgataggtaaaccgatttccaacattcaattgtatatcgtacaccccgaatcggaatattttcaaccgctcggtgtggcaggagagctgtgtatcgccggagacgggctcgcacggggctatttgaaccgcccggagctgacggctgagaagtttgcagctcacccatatgaagcagggaagctgatgtaccgtacaggcgacttggcaagatggctgcctgacggcaatatcgagtatttgggaagaattgatcatcaagtgaaaatccgaggctaccggatagaactcggcgagatcgaagcatctttactacaactcgatgctgtcaaagaagcggtcgtcatcgcgattgaaaaagagggctcaaaacagctgtgcgcttacttgtcaggagacgagtcattaaatacggcgcagctgaagcgtcatttgctgaacaatctgcctacgtatatgattccggcttattttgtacaagtagagaatatgccgataaccgctaatggaaaaatcgatcgaaaagcgttgccggctcctgagggaaataggcttaccggaaccgaatacgcagcgccaggaacgttaattgaaaagcagctggccgatatatggaaggatattttagctctgcctgaccccgggattaaagatcacttctttgacgttggcggccattcacttaaagtattgcagctcattcatcaaattaacgccagtatgggaatcaacatgcattatcaagccgtatacgattttcctaccatcgaaacaatggcacgcgccattcaagcggccgttttcgaatccgagacggataacgtattcgtcaagctgaatcaggaagattcaatccctgtgttctgtttcccgcctttaatcgggtatggactcgtttataatgaaatggcgaaaagacttgacggcgtcagcaccatctatgccgctgatttcttagaagagccgtctcatgggaaagagatcgttgaccggtatgcagaaagcatgataagcattcaagaacaagggccttttgttctgcttggttactcttccggatcgaatttggcttttgaggttgccaaagccttagaaaagcgggggcgcaccgtatctgatgtgattatgctggattctaaaatcaccgattcggtaactcatttatcggaagaggaaatccaagagatcgtccatctgaatatggacattattccggactactacagagaaatattaaccattccttcgattaaggataaaatcagaggctatcttgcgtatcacaatgaactgatcaattccggcgccgttaacgccaacatccatcatttgctatgcggcgatgtaaccgatgataggggctggacacaatcaacagcacagcattatcttgagtacaaattaaaaggagatcacgtgacgatctttgaacctcacaatatcgaagaaaatacggatgcaattcgatctattattaaacggattgaagaacggcatcatcacggacttgttcttgaagaacaactgtcaataggatcgtttgctggcgacacgaagtttgacaaaatgtaagtgatcaagtgtaaaacgccgctggcctggcactcagcggcgttttttattaaaaaggcgagagtcatactcctgtgttcgcaaggcttactccagagccgttctccatgactggttgtcatcaaatggtaaaaaaatcatcatacattttaaggaaaaagaaggatgtcaagttattagaaaaaagtgtagcgtatgtttatgggtactagctctattattgagttgcttaactgcggagtctgctttttactgccggtactgcaatttggtctcaaatggtaaaagttccccgaatttaaagaaaaaggaggagtgttaagttatgtgtaaaaaatgttgcgtatgcctatgggtccttgctttattattgagttgcttcactgggaagtctgcgtatgctgccagcactccaattgcaaaacatgttgggaattcaaatccgcttatcgaccatcatctgggcgcggatccgtttgcgctgacctataacggaagagtctatatctatatgtcaagcgatgactatgaatataatagcgacggcacgattaaggataattcatttgccaatttgaataaaatatccgtcatatcttcagcggatatggtgaactggacagatcacggagcgattcccgcagcgggtgccaatggggtgaatggcggccgggggattgccaaatgggcaggagcatcatgggccccgtcagccgcggtgaaaaagatcaacggtaaggataaatttttcctttatttcgcaaacggcggcggaggtatcggggttctcaccgcagacagcccgaccggtccgtggacagatccgatcggaaaaccgctggtgacgccaagtacaccaggaatgtccggtgttgtatggctttttgatccggcagtattcgtagatgatgacggtaccggttacctatatgccggcggaggcgttccgggcggttcaaatccaacgcagggacaatgggccaatcctaaaacagcaagagtcatgaaattagggcctgatatgaccagtgttgccggaagtgcatctacgattgatgcgccttttatgtttgaagattcgggaatgcataagtataacggaaaatattactattcctattgtatcaatttcgggggcgcgcacccggccgataaacctccaggtgagatcggctatatgaccagctcaagtcctatgaattctttttcgtatagagggcactttctgaaaaatccgggagcatttttcggaggcggcggaaacaatcaccatgctgtttttaattttaaaaacgagtggtatgtggtgtatcatactcaaactgtcagctccgctctttacggggccggcaaaggataccgttctccccatataaataagcttgtgcataatccagatggctccctgcaagaggtagcggcaaattttgcaggtgtcaaacagctatccaacttgaatccatataaccgggtagaagcggaaacgtttgcctggaacggacggattttgacagaggcatcctcagcacccggcgggccggtcaataatcaacatgtcacaaacattcataacggagactggattgctgtaggaaatgcagatttcgggtcaggcggtgccaggacgtttaaagcaaatgtagcgtccgctctcggcggaaaaatagaagtgcgactagacagtgcaaacggtaagcttgtcggaaccttgaatgtcccttccacaggcggaacgcaatcctggagagaaatagaaactgcggtaagcggcgcatccggtgttcacaacgtattctttgtatttaccggaactggtacaggaaacttgtttaatgttgattactggcagtttacacaaagataagcaaaggtacgttttctaagtctataaaagataaatgaaggagaggaaaaaatgatgtcgagcgtaaaaaaaccaatttgtgtattattggtatgtttcacaatgctgtccgtcatgctgttaggaccgggagttactgaagtttcagcagcaagtgatgcaacagttaatatatctgcagaaagacaagtgattcgcggttttggaggaatgaatcacccggcttggattggagacttgactgcggctcaacgggagaccgcttttggcaatggacagaatcagttaggtttttcggtcttaagaattcatgtagatgagaatagaaataattggtacaaggaagtggagactgcaaagagtgcgatcaaacacggagcaatcgtttttgcttccccttggaatccgccaaacgatatggttgagactttcaatcataatggtgacacatcagctaagcggctgagatacgataagtacgccgcatacgcacagcatcttaacgatttcgttaatttcatgaagagtaatggtgtgaatctgtatgcgatttctatgcagaacgagcctgattacgctcacgaatggacatggtggacgcctcaagaaatcctgcgtttcatgagagagaatgccggttccattaatgcccgtgtgattgcgccggaatcatttcaatacctgaaaaatatatcggaccccattttgaacgatccgcaggcgcttaggaatatggatatcctcggaacccacctgtacggcactcaggtcagtcagtttccttatcctcttttcaaacaaaaaggagcggggaaggacctttggatgacggaagtatactatccgaacagtgataacaactcggcggatcgatggcctgaggctttaggtgtttcagagcatattcatcattcaatggtagagggagattttcaagcttatgtgtggtggtacatccgcagatcatacggcccgatgaaagaagatgggacgatcagcaaacgcggatacaatatggctcatttctcaaaatttgtgcgccctggctatgtaaggattgatgcaacgaaaaatcctgaaccgaatgtttacgtgtcagcctataaaggagacaataaagtcgtgattgttgccattaataaaaataacacaggggtcaaccaaaacttcgtgttgcagaatgggtctgcttcgcaagtatccagatggatcacgagcagcagcagcaatcttcaacctggaacggatctcaaagtaacggataatcatttttgggcccatctgccggctcaaagcgtgacaacatttgttgtaaagcgttaaaggcatcagcattgcattaagccaattttcttactcggaaaagaaaattggcttattttctgtgggagagaatgttgattttttaacgatacacggacattgggtataataatgacaatgacttcaaggagtgatcaatatatgtcacggcttcacagcaaagtattaatcatagacgatgaaaaagaaattttggaactgatcaaaaccgtattaataagagaaggcattgatcgcgtagtgaccgcttcaactgcccgtgacggattggctcaatttcatcaagaaaatcccgatcttgtgatattggatatcatgctgccagacggtgaaggctatgatatctgcaagcaaataagggacatttcacacattcctattatctttttgtctgcaaagggggaggaaacggataaaattgtaggacttgccatcggcggggacgactacattacaaaacctttcagccctaaagaagtcgcataccgggtcaaagcgcagctgagacgggtctcttacttacagccttctcaaaccggaaccgtgataaaaaaagggccatttgaattaaaccaacaacaagccgagctcaccaaaaatgaagcggctattgagctaacacctaaagaacttatgcttatggcctattttctgcagcatcccaatcgggtgatcagtaaagaaacactctatcaagctgtatggggagaagactttttcggttctgacaacacggtgatggttcatatacgcaggctccgtgagaaaatagaaactgtcccatcaaaaccagactttctcgtcactgtgaaagggttaggctacaaatttgttgtaaaggatgcgtaaggatgaattggcgattaacaggcagatacatggtatctgtcatcatagtgaccatcattacagtcttcattaatttatttatttttatgttttggctcgttttacaggcgaacagccaacatgacgaagaaagtacacctgaaactttcacaagatcattcggacaatatgtcacgttatcgaacaagggtatcacagtaaacaaagagggccaaaaagctttaaaagagcagaatgcatggattcaaatattagatgaaaacggacaggatgtttatcatgatagagaacctaaaggactgaagaaaaaatatacgcctattgaaattgtaaatttacataaatataaggatgaacaattattatcaaccatttacgccggcggaaaaaaagtaaacggcaaggagtacagttactttatagggtttaaaaatccctctctcggaaaatttgtcctctcatatgataccaaggaatttgtgacgaagttcaatacaggaaccatcatattattatcaatagatgcattgatcgcgttactcattggctatctattcagccggcagctcacaaaaccgctcggccgtgtcattcaaggaatccagcggttagctaatggagattatacgatcaaaatgaaatccaaaggcatttataaagatgtgttctataatgtcaatcacttatcggaacaactatctttaagcaaaaaagaaaaagataaattagagcaaatgcgtgaagagtggatcagtcatatttctcatgacattaaaacaccattagcatctattcaaggctatgcagaaatcatcaaagatccgaattatcatctcacagtcgaacagatcagagattacgcccggatcattgagagtaaatcgctctatatgaaagatgtgatggaagatttaaatttaacgacaaggctgaaaaacaacgatgtgatgttaaataaagaacgggtaaaccttgtatcgctgctgcgggaaacgttaattgatattttaaacgattcgagatatgcggataagtccattgagcttcaaacgaacctggaaaaactgatgctgaaccttgatgcgatattgattcggagagcggtcacgaatctcattttaaatgccctcgttcacaatgatcccgatgtgaagatcgttgtacagcttgaacaaaaagaacgaactcatgtgacaattaaggacaacggcaaagggatagaagaagaggagctggaaaaagtgtttgatcgctattacagggggacaaatacaggaacgacgcatgcaggctctggtcttggaatggccatagcaaaggatattatccaaaagcacggaggggacatcaccattcacagcaccgcgggagaagggacaacgatagatatacaattatcataatggctatacaaaaaaaacggttctgctgattaataacagaaccgttttttcctattgttccgaaaacactttgattcctttgacaatgttccaaatgaaaaaatagatcgccacaaggaatgtaacagcataagtcgcaagcaggaaaggcccggcatgtctgatatcattcataccaagtaaacctgaagcgatgatgccaattccaaaaatcaaataaggaatcagatgcgtccacaaagattttttcgcatgttctttcacatcgtcccggcttaagaaatagacgataatcggaaacagaaacggcgcaaaaaatatactgaagtaacataatgaagacaaaattttattttctctcaaaccttttcacctctatgatttattgaagggggaattcttctggctgaatcccacactgaagtacaatcttattgtacaactccaaccttaacccgtattaatccgaaccttacatcaaccttaaattaacaaggacgggcaagggctcgtcttcttacagcaatcataagattcaatgccatattgagactcatcacattacatttagagcgtctacgtcggaaatacatttaatttttcgattcgattgaaaaataacgtgtaaagtcccgattcagtccagttttctttgttctatatgtgtcaggtgtgtcttattcaatagagttagagcaaattgacaggcttttaaacctcccaaaaacaagaaattaggttgatagacaatcatgagaaagatttttacaatgagttcgagctcataagaagtgaagagccaaaataatgcgaaggaggaaaagatcagatatgaaacggtcaatttctatttttattacgtgtttattgattacagtattgacaatgggcggcttgcaggcttcccaggcatctgcagcagggacaaaaacgccagcagccaagaatgggcagcttagcataaaaggaacacagctcgtaaaccgggacggcaaagcggtacaattgaaagggatcagttcacatggattgcaatggtatggcgattttgtcaataaagacagcttaaaatggctgagagacgattggggcataaccgttttccgcgcggcgatgtatacggcagatggcggttatattgataatccgtccgtgaaaaataaagtaaaagaagcggttgaagcggcaaaagaacttgggatatatgtcatcattgactggcatatcttaaatgacggcaacccaaaccaacataaagagaaggcaaaagaattttttaaggaaatgtcaagtctttacggaaacacgccaaacgtcatttatgaaattgcaaacgaaccaaacggtgatgtgaactggaagcgtgatattaaaccgtatgcggaagaagtgatttccgttatccgcaaaaatgatccagacaacatcatcattgtcggaaccggtacatggagccaagatgtgaatgatgcagccgatgatcagctaaaagatgcaaacgtcatgtacgcgcttcatttttatgccggcacacacggccaatctttacgggataaagcaaactatgcactcagtaaaggagcgcctattttcgtgacggaatggggaacaagcgacgcgtctggaaatggcggtgtattccttgaccagtcgcgggaatggctgaattatctcgacagcaagaacatcagctgggtgaactggaatctttctgataagcaggaatcatcctcagcgttaaagccgggagcatctaaaacaggcggctggccgcttacagatttaactgcttcaggaacattcgtaagagaaaacattctcggcaacaaagattcaacgaaagaacgccctgaaacgccagcacaagataaccccgcacaggaaaacggcatttctgtacaatacaaagcaggggatggggtgtgaacagcaaccaaatccgcccgcagcttcacataaaaaataacggcaatgcgacggttgatttaaaagatgtcactgcccgttactggtataacgcgaaaaacaagggccaaaactttgactgtgactacgcgcagattggatgcggcaatctgacccacaaatttgtgacgctgcataaacctaagcaaggtgcagatacctatctggaactgggttttaaaacaggaacgctgtcaccgggagcaagcacagggaatattcagcttcgtcttcacaatgatgactggagtaattatgcacaaagcgacgattattcctttttccaatcaaatacatttaaaacaacgaaaaaaatcacattatatcatcaaggaaaactgatttggggaacagaacccaattagttaagctttaggcggacatcagcaacgatgtccgcttttatcatcttaaacagcaatacatggaggtttacgtgaagaagtagatatgactgtacatataatgtaatcgtttcacagttttgaaaagcgtttatagcgcaatgtatgtattttacacccgccacttttattacttaagggggaacaagagaatgaaaaggtatgacgcatttccagagccaaccggcggctatactgtcggccgcacacaactggattttgagtacacggcatcagatcatacaaaaagagaactgacggtgtttgtgtactatccgtccgacagcagcgaagggaagactacatcaacgtacatgtttcctgaagtctgcgaaatgcttgatgagcagccgcttctcactgcgcggaagaatgcttactctatagatatcaagacccaatgttacgacggccttgctctctccgggaaggaaaaacgctatccggtgttattctatgtttgcggcgggggcggttctccagaatggggcacagtgatctgtacagacttggcaagcgtgggatatgtggtggtaagcatcggccatcagaatagcacgatgtataagcgtaaagatgggcgcccgtttaatgtatcaaaggattttacgtagaggttttttaatattaccttacaaaaaggggatgctgttagaatatggacccacttatatattctcttcacaatttctagtttacataatatatattctaggaagttatacagagaaatgaattacaagtctcataaaccaagtatactttagttattgagacaaagaagagaaatttataactgcaataaatgtttacagcgctagttttgattcagctgaaaaacctaacgcaaaagcaagcttgaaatgaatttcttgtttggtcattacccgcaatgagatcatttctttaggcaagcatataaaaaatcaggtctgataatactttgccgcatcttccctgcttttttccgcgtaatcataaacaaaaagaacaagattttcagcagggccatctgcccggctgccttcatcataccgctcaatgtaggaatctttgcagccgttttcatttcacgaatcgtgagagacaggcaaagaccgcaagaccgaggccgctcccggtccaaaacgacaaaaaactttctccataagataaacgtgacaatgagaaaaagcaccttgtctttcgtaacgcatcacatcctctaatatgaattgacttccgggtgcattatcttcttcctatctattcatataatgagaaaaagccgcctgataaacagacggctctgcagcttattatttgcttcggttacctgcggaagcatgagtgatccgataatgcacagttaaaaatttcagtccgaacagccacatatgatgaacggccttcaggcttgtttcgctctgggctgaaataagaaatgtctctgccagcggaagatgacacgtcccccatttcgtctggagataaatcccttcatcacccgctccgctttttcgccgtctgcttgtcaaaacaagattctgcttacgcgcataaggctttaaaatgcccgtcatttggccgtacggcagaggaagagagatattcatgtatccttccccttttgacctgtatgctgaatacagcgcagtaaaaacggtttcctgcttttcatttgttctgatccatgcacggacattttttctgccgtctttatcagagtcaactcctataatatcactgtgcatgatataccaatccggattcatggacagatgaatctgtcccgctcttctgctgaacggctcgtacacgcgcgcgaacggacgaaaccaaccgctccacgtcactttcgccatgatgtcataatcaattgtcttttcataaaaggaaataacggccggcgccagcttttcagttgaaaagtcttcagaatgcagttctctcagctgatcctgaaggccggtataatggatgtcatttgctgcatgaatgtcagtcaaaaaatctttgcctatcgttcccttcccgtaaattctgctgaacgttctttcactgttctcatcgaacggtctaggattttctattctccaccccgccaaagccggcaggataacgccaaatgcattgacggccccgtgaatccaaatcatctggctgatcgtgagcgttgcctcctcgcggtagacaccgtacgaatatatcaaagaaaaagcaattgtgatcattaacacagccgaagaactcctgatcaagatcctgcctgttttcgtaacaaacggcgccttaaagacgagatatgcatttacatacagacccgcaagatacagagcgacagcaatcacatcaagtgtctttgaaaatgtaatccccaaggcaattaggaccggcgaaatcaaaataatgactgtgctccaccggtaaagtccgcgtttctcccgtatgatcctgccgagcaatccgttaaagatcggaatgagaaaagcggaatagtgaaagtgcaccgccgtcagcagaacgataagcgggccgaaattcaggacgggaatctcaaggacatatgcgaagaaccagaatccgcccccggccaaataaatgaaacccgccataactgacatctcttctgttctgtgaatatttgttttcatcagccggcggacagcatacagtgccagtccaagcgtataaatgaaccacacaaaggcaaaaaagctgaagcctgtgacaagcgcaagcgccgcacatatagcggcaacaggataactccgtaaccacacattctctaaggtctttgacggccgaaaagcaaagcagaatacagcgggaacgaaaaaaagcacggaaaataaaacaaacgtctcagcagctgatatatgcggagcttcagccgccgcaaatcccaaaaagcaaaccacgcttaccatgagatgacgcttcagcatgtttctccctctgtttcccggaaagtcccccggtaagagaaaagcgtgccgagtatccggtttttcacatgaacctttatgctgaagcaattcatttcctcatcataagcctcataaacggttgaattcccgcacagccatgccggaatcgggattttctttccgcctatcaggagccactgccttccggatgtaataacaagccctccgtctgaagacgcttctaaatgcagttcagacagtaggatgtgaggtttgccgaagtaatcaagaattctgttttcccgctcatcatattccatgaccgcatcaaaaaaacgcgttttgcctttaaagaaaaaggtacgattccattccacgccattttgcctgtttttgttttcgatagtaaaagggatatcgtttcccctctctgagaaaaaacatctgaaaaaaacaccggtctttaaaagcattctgacaagaaaagaacctccctttatttctgacataacgccttctccgcaaaacgtgcgtgatccgtcaaatctgtaccgtttctgcagcatcgggtgcagtgattgataatgagtaatcgttttttcatacattgaatccgtcatttcacttctctctttcgttttgtatgccaggcgctcggcagcttgagcttaagaatcatgccggctatcgtaaggactcctaatgaaatcaagaatccgccgccggaatataacagtgccgttacacaaaagaagactgactgcccggcgtgaatcagccactttctccgcatgggaagcagccataatacccctaaccctgtctccagcgttcccctcacgatctctgcatcggcacagccatcatgaaagccttgaaaaaaccaatacagactgaatacgaggcacatacagacatagacaaatccgaaacggaccgatatcttcggatgtctgttttgttctatccaaagccgcaacgcatcaaagctccatgcggtagcccagcttagcagaggacgaaataaaaaccggtctatccaacttcccggcagaccgcgggccgtttcatattgatattgagtcaaaaatgaggtttgtccgttatcccgctctgtatacttccagtagcccctgccttcttttataagtgacagcggatgatcagaggcaaaagcgagcgaagacactctttctgacaagcgaggccttatgtcacctattgattcgcccgtgccggataccttcagcccaaaaccgattcgtgtttcatatagaaatctctgcggttcatctggcagcctatgaagatatgtaatgtcagaaaaacgcagatcccattctttatgaagatgcgggttttgcgtatattcccaaagcgtttctatatcagatgcaatattgatttcgacatatatcggcttctgtttcatgctccctcctcttcccttcttttgtaaacaattcctatattatcataggaacagatcaagcgggagaacgaaaaggccatcccgttatcggcaggacagcctcagtggctttgatgacttatgaataaggtatcgtgtcttttttatcttcagaaactgtttgaatgataatcggacgcacaaaacggattaccgcagccgaggccaaaacagctaatccgcctgcaagcaaaaacgcccccgagaatgatccgcttttatccgcgataaagccggttaaagcaggcccgataataccggccgtgtttgcaagaaaatgcataaagccgccgactgacccgacattcctttgatcaaccacatcgtgaatcaccgcccaatagatagagcccgttatatataaaaagaagactgataaagcaacgagaataacggcacttacggcagtggtaacaagtccggcaaatccgatcagtacagcggaagcgaacaggcaagtgacaagaatgactttccgtgagaacaaaaccccttttccggcggtttttttgtatacataatcagaaatcattccgcctgccgccaaaccgataaatccaagaatccagggaataacagtcaccacgctcataaattcaatacttaatccgcgttctttcaccagatagctcggaaaccatgttaagaagaaaaataagatgtaattgtaggcgaaaaaggcaaaagccgtgaagagaaccgttttttgttttaaataaaaggtcatcgggatatgctgctcatgcgattgaaccgccgctttcattgccggggtgtcttccgtctgtgccggccgttctttgacaaatttaaaccagataaacgcccagactaaaccgacgatcatgatcaggacaaaggaaaccttccagctgaatgccacagcaatcatcccgacaatcgggccggaaatcgctccgccgagcggcgtgccgctgtttgtcaggccgatgaccgtggcgcgctgagacggaggaaaccaattgttgaccattttgcttatggcagccgacagcggcccctcgcccataccgaataaaacacggataatcaaaagacttacaaatccgaaagcaagcgcaaccgccccgctgaaaagagaccaaacgatcatcgccgtacacaatgtcaatttagccccgtaccggtcagatgcaacaccgccaaggaagttacacacagcgtatccgacagaaaaactgctgaaaatcagccccatttgggttgcagacaatgtgagatcctgctgtatgaacggcgccgcaatagacagcgctgaacggtctaaatagttaatcaccccggctgaaaataaaagaagaagaatagggaatctatcctttgagaacataaaatccctccctcttatttcataatttaaattgccggagtaaaccggtttatgtaatgaaaccggttatccggattgccttgccagaagcgccggtttatagcggtgaatccgtttttcaccgctatctttttcttgtatctggcaaagaagaaggcttcccgcttttcgcgccatttctgccgcaggctggacgatcgtcgtaatcggaggagtaaaaaaacccgcaaaaggaacttcatcaattccgatgacggctgccttatccgggattgtcatatcatgctccttcatatacttcagcacctcaacaagaacgatatcgtttgccgccaatatcgctttcggaggctcctgaagtgagaacagctctgacaaaacattggaaatatcagccgcatcggctgttttgatatattcgttccgcaccatcatcccgtgggggtcaagcgcctttttatacccttcaatccgctctaccctcggactgatttcccgaataatggacgtcgtaataatcgcgattctcttaatgccgctctcgataaaccggtcaacggcaagaccggctgcatgatggttatcaagcatcactgtcggaatcccgagttcttcaatggttctgtccataaacacgaccggaaacgtatcgcgtttcatcttttcatataaggagagattttcgcccgtcggaaaaataataattccgtccacctgcttggccctgagcatttcaatatatttcttttctttttccggttcatcatccgcattgcagacaataatatgaaatccttgttcatgaaaatagtcttccaccgccctgatgacctgagtggaaaaggtgtgaagaatattagccaccaccacacctaccgtaaatgttgatttctgttttaagctgcgggcgacgaaattcggctgatagttcagctcatgaatggccgcttctattttttgtttcgttttctcgctcatatagtcatagcgctgatttaaaaattgagatacggtgcttttagatacgtttgcatatttcgccacatcagaaattgtaatggttttcatagactcatccccgtctgtcttcatttttcactagtataagtcagaagtaaatagtttacaatctgacagggaactggattctgtcacactcccgaataagccataaaacctccgtcgacgggaacggtgaccccggtgataaagcctgagtatgaatcatccgaaagccacaggagcgttcccagaaggtcttccggtttcccgaaacgtttcatcggtgtatgtgccataatcttattggatcggtctgtcagacttccatcttcctgtaataacaactcacggttttgcgcagtcaaaaagaaacccggagcgatggcattcacccgcagcccttttttcgcgaaatgaacagccatccacatcgtaaaattctgaaccgccgccttagccgcactgtaggcaggcacctttgtcatcggtgtatacgcactcatagaagaaatattaataatcgcgggacattccgccttcaaaaggtcttttccaaacacttgcgatgccagaaatgcaccggtaaagttgcttgaaaatacgctggaaaatcccgtttcgtccatatcaaaaaatgatgggctctgctcatcctcttcatacgtctcattggcagtgatcgcatcagcgtggtttcccccggctccgttaattaaaagattgacagagccgaaccggctgataatctcgtcttttgccttttcgagcgaatcacgggctgaaacatcagccggtacagaaaccgcggttcctccagcatcagcaatctcgcccgccgcacgctctgctttatcagcattccggctgacgatcgcaattttcatcccctgccgtgaaagctcctttgccattgctgaacagagaacaccgctcccgcctgttatgacagcggttcttcctgataaacgtccatgaatcggtctcatctcttcacctctttctcatgagacgagaacgcatcccacagtccgctcaagtacataattcctaaggcacgatcatataaaccatagcccggccggcattgttcgccccagatatgacggccgtgatcaggccgtacatatcctttgtagccttggccgtgcaattcttttaccacaccgataatatcaatggacccatcactggtaagatgcgaagtttccgtaaaatcaccgttatcgcagattttcacatttcgtatatgggcaaacggcgcagctcccgcatagtgtttggcgatcttcaccatatcattggcgggatccgctcccatcgaacccgtgcacaacgtaatacagttggcgggtgaatctgaaatctctcgcagcttttcataacttttctcaccggtgataatacggggcaggccaaaaattgaccaaggcggatcatccggatgaatggccatttgaatgccgtgttcctccgctacaggaaggatttcatgtaaaaagaattctagattggcccaaagctgtttttcaccgaccgtttgataggcttcaaacagttccttgatccgggccattttctccggctcccacccgggaagcgtcaaatcagaagattcttcaaccgtgcggatcagttcttctggagggagactttccactttcgctttttcaaaaaacaaagcagttgacccatcctccagtgcgcggaacatatcagtacgcgtccagtcaaaaatcggcatgaaattgtaacagatgactttcacgccgaattcggacagattgcgaatggtctgtttatagtgctcaatatattgtccgcgttcttcatggccgagtttaatggcttcatgaacattcacgctttccacgacctctgcatgaaacccataggattgaatgaatctgacttcggcttcaatgtcctccttttcccatacttcgcccgcgggcttctggtgaagagcccagacgatgcctttgaccccgggaatttgtctgacatgttcaagcgtcaccgtatcattaccttggccgtaccagcgaaacgtgatattcatgttacacccccgtatattcgttttttcggcagacgtattctttgctgagggatacggcagcttcatagccgcccttttgatatgcttttgtcaagtcgcttcccactccgaccgcgaccgctccggcagaaagccagtcattcatgctgtttaatgagatacccccggtcggcataatgcggacattcggcagagggccgttgaccgacttgataaatgagggattaaacgaattagcggggaacagctttaccacatcacatccggcttcgagcgccaaagccatatcagacacgctcatgcatcccggaagatacggtacgctgtactggttgcatagagatgctatctcttttacaaaatgagagctgacgataaatgaggcgcctgataaaatggcgtgtctcgctgtttcggtatccattacagaaccggctccaagaagaatatcttgatgccggagttccttaaagacatcttccacttcaggagttgtgtatgtaagctcaatggcgctgatacctcctgaaatggccgcttttgaaacttcaagcgcctcttggctgttttgtccccttatgacagccaccacttgtgcatgcagaagtttttcgtaaatggcgtacttaggcagcattctcgctcctcctttaatcaaacgtaatgattgcttttcccaccttgcccgggtgctgttcgatcaactgaaatgctcgatggacgtcatctgctgaaaatgtatgtgtaataagaccgccgtgcgttaacaggcctttattcagtaagtctgtaatgtacggaaactgattcgtctgcaatcttgaaccggtgatcgtgacttccttttttgtgatcggaagctgagaaatgccggcagtcctctcatcaaaaccaagcacaaccacatgaccggccggagacactgcgtcaattgacgtttcaaacgttgaggggagacagacggcatcaatgacgacattagcgccttcattttttgtccattcgttcacccgcaaaacgggatcttctttttgcgcgttgacggtaacatccgcaccgtttttttcagcgaaggccaagcgttcatcattcaagtcggttatcatgacggaagcgcctttgaactttgccatttttaatatgcagattccgatcggccccgctccttgaatcaaaacggtatcttccttctcgacacggcctctccaaacggcctgggcgccgatcgtatatggttctgccatgaccgcttcctcccagggtagatcgggcgaaacagcatacagctgcttttccggaagcacgatatattcccgcatcccgccatcttcatgaacgccgaacaccgaaagcgctttgcagacgttcggacgtcctttccggcaggcatagcatgttccgcaataagatatcggttcaatcactacccggtcacccggcttgaaacgccggacatgagaaccggtctttgcgacttcccctgtgacttcatgtccgattactctcggcagggacgctaacggatttgtcccatgataaatatgcaaatctgatccgcaaattccgacccgattcaccttgacaagaacatcatccgcgtggacaacagacggtttctcacattccgtcaccatcagatcaaatgctttccgtacttgaaccgctttcattttttcacccgctttttaagttgtgcttgctaccgttcaatcacagtctctttgtttacaaatgacagaacctcttctaggcagggaagcccttcattgtcaccggaaactgtggtgacgagcgcaccgactgcatttgcaaactccagacgtttttccggttcaaaaccatgtagataactgtacaggtagccggcattaaagccgtcacccgctcctaccgtgtcgacaggcgcaaccgggaaagcctctttgtgaacccacttatgatcatgatacagcgcagaacccgcttcaccgtcttttatgacaagctgactgattgaatagctctctgcaaaccgggctaatgcttcattttctcctatacctgtcagctgtttcatttcgtcccggcccgccagaagaatatcagtatgcggaaagatttgatgaaatgccgcacgtgcctcctcaatcgtccacagcttcagcctgatattcggatcaaaagatacgggaatctttcttgctttggcgatggaaagcaccctttcagcaatttcaagatttttcttaccaagcgcgaggaacacaccggtaagatgaacgatgtgaatgccgtcaaacatattctcagttatatcttccggtgcaagagtcagaattggtgaattgaaacgataataaaacgtcttgcctgaaccgtcatttctgatctctttgacatttaaagatgtaggaaagccttcaacaaaggagacgtcagtcacatcaattccttctcctttggcaaactgataaatcactctgccgaactcatccttccccagtctgctgacccactttgagtgcaggttcaatctggcgcatgcaatcgcaaaattcagttcagctcctcctgcttttcgttcaaaatgggtaacaaaacgcaaaggtcctgtgcttgcgggatttaaggtgatcatcgcatcaccgatcgtaaaaatgccataatcagaagccacatcaatactcctttcctttaagactaaatcggtttggtaaaccggtttagttaaactttatatgaaagcacttacatatacaagagaaaaatacaataaattcaaaaaaatctgtttccagtaaaaataacccggtttttcacataaaaaacccctcacaacaaaatgtaagggggttttttgaaaattgtatgcatgtttcctcagttagcagtcttacgttcagggcttgtaccttcttcttccgcccatgtttcaatatgcttgagctccggagtattctcggctttgaatacgggatcaagaccttttttgcgctgagcggcataatccttatagatcttgtaggctacattactcagcagtaaaattgccactaagttaatgagagccaagagacccataaacaagtttgccatgtcccagacgatctggaagtcagccaaacatccgtataccaccatcactacgacgaatacgcggtaaatattaagccatgttttgcttgttttaataaattcaatattcgtttcaccatagtaatagttgccgacgactgagctgaatgcgaataaaaacatcgcaatcgcaataaatgtcggcgcccatccgccgagatggtgctgcagtgcggcttgcgtcacttggatgccgtcgcctttaggcgtaacgctgtacaataaaatgataaaagcagtcgatgtacaaacgataaacgtatcaaagaacacgccgagggtctgaattaatccctgcttagccggatgcgacacatgtgcagctgctgcggcattcggcgcgcttcccattcccgcttcgtttgaaaacaggccgcgctgcgctccgataataatgatgcttcctaagcttccgccgacgatctgctcaagaccgaacgcatttttcacaatcgtaacaagcagctcaggtaccgccgaaatatttacaatcacgacatacagcgcgatcagaatatacattcccgccataaccggaacgattaattgcgagacggaaacaacacgcttcagaccgccgaatataatgaaagccgttaatacagctaaaatgattgcgataactgttttattcacatggaatgcttcgtcaaacgccacagaaatcgtatttgactgcaccgcgttaaatataagtccgaaagaaacggtaatcaatacggcgaataaaataccgagccagcgggcgcccagtccctttgccatgtaatatgccggaccgccgcggaattcgtcaccggaacgcactttatacagctgtgccaaggtgctttccacaaagctggaagccataccgacaatcgctacgatccacatccaaaatactgcgccgggaccgcctgttgcaatcgccagcgcgacgccggtcaagtttccggttccgacacgagaagctgctgagataaagaatgcctgcattgaagacactcctttatttccttgcggcttctccccgacgattctgaacatttcaaaaaagtactggaattgaataaagcgaaaacggaacgtaaagtacaatccgatcccgactaaaatataaacaagatacttccaaataaaatcatttggaacatttatgatttcactgatgaaagcctccatgtttaacctcccttttacatatcttttactgtcatttttgctgtatatgttagatcttttaacacaacgggtattattatatcacaacaacagtggttgagaagtttttttaagaaaatgtttcggtttcttcatcacatcttttgctgtcatgccccgttttttatcttacagcctgaaaaatgttgtcacgttataaggaatgcgtgcatatcataacaaataggtctttaagaaaaaagagatgaaaagatggatggaatggtatatacttaaccaggataataattttttaaatttaataaatgtgtttactttacatttaaattagggtattataataaaaatattcagacttatgaagggaggagaacatttgaaaaaaatcttgtttttaaaagcttctattttatttttagcgattgcaagctttcatttgctctccattccccatgcgtttgataccgctcatcattttaaagcggtagccgaccagcaggaaatgcacgaaatgaaggccggccaaaatgctgatgatgagaaaaaatcgctgacgggctcatatatcttgacggcgctttttgccgcttctgtctcactgattgtgatatcagacaggagacgccccgcttcccggagaagacagcgaaagaaaagctttttaatcgctaaattttatcagtcctcgtatttcgatgagcttcatgttcaacatcgcctatctatgtaacataaaatgaggaggttgttaaacatgttgtttatcttacgaatggtgattttagggttgttttcattcactgcattgaatttatttgtatggcagggaatcgaagtcattcacgctatcactgacttattcggcagccatgaaagctaaatagtaaaacctccgctcaatgagcggaggttttttattttatttttactcttaaacatcgtatgcagggatacgccatacatctgttaccggccctgtctcatcttcatcggtaaagaaggagccgttgctgtatcggtcattcgcccgcaaggacttcacggcgatttcgattctctcgcctttttctgtttccgcagcgatcatgtcggccaaagcgcacgcaaatacgccgactgcccgatgcgggttcttttttagctcacgcagcatgatgacaccgcgtttcgccctggatgttttttcgaattcagataggttcatccgtttgattgctccccgctgtgtgacgaggacaagcgaatctgtttcatgcaggatttgccctgatacgacggtatcaccgtcttttaaatttatgccctttacgccggccgcacgggcaccgactacatttacttcatcttcaccgaaccataaaccgtacccgaggcgggtggcgataaacagctggctgccgccgtctgtgacatgaacatcaatcagctcatcatcccctttaaggttaagggcaacaagcgctttcgagtaacgctgcgctttgtaatgcgtcatttcagttctcttcaccataccgtttttcgtcatgaacagtaaatatgaagatggatcaaattcttttaccggtatagctttcacgatggtttcatcacggtcaatcgtgatgatgttcgttacgtgctgccccatgtctttccacctgatatcgggaagctggtgaaccggacaataaacatagcttcccttattggtaaagagcagaagaacatccgttgtattcatttcaaattggtgaatcagcctgtcagtatccttcataccgaaatcctggccgttagaagcggcaaatgaccgctggcttgttcgttttacatagccgtcttttgtgactgtcacatatacgtcctcagaggcaaccatgacttcaagattgattttaatttcctctatcttttcttcaatgacagaccgtctgctgtcagcataggtctttttcaattttttcaggctgcttgtaatgacttttaacagctttttatcatgacttaaaatggcttcgagctcctgaattttcttgctgagctcttccgcttcctcttttagcgccgtaatatccgtgtttgtcagacgatacagctgcaaggatacgatcgcttcggcctgcggctccgtaaatgcgaatttagaaattaagttttgtttcgcatctttcttgtcgctgcttgcccggatgaccgctatgacctcatctaacacggacagtgccttcatcagtccttcaacgatgtgatgccgctcttttgctttttgtaattcaaagacggagcggtttgtcaccacttccttctgatgggaaatatacgcatccaggatggccgtaagactcatcagcatcggccggcggttatgtatggcgaccatattaaagttatatgttgtctgcagatcagtgtttttatataagaaattcaggatgccttttgcatcggcttctttctttaactcaacgaccacccgaagccccgtgcggtcagtttcatccctgacttcagaaatgccttcgacttttttgtctatgcggtattcgtccattttcttaacgagattggctttgtttacttcaaacggaatttctgtaatgacgatctgctcccgtccgcctcttacggattccacttcagccttgccgcggataataattttgcctttaccggtttcataagccttccgaatgccgtcgactccttgaataatgcctcctgtcggaaagtcaggccctttaatcacctgcatcaagtcatcgacagtgcaatccggagattcaatccgtttaatgacggcatcaatgacctcacccagatgatgagggggaatatcagtcgcatagcccgctgaaatcccggttgatccgttaacaagcaagttagggaacatggcgggcaaaacaaccggctctttactggtgtcatcaaagttcggaacgaattcaaccgtatttttatcaatatcacgcaaaagctctgacgcgatagaagataatctcgcttccgtataacgcatggcagccggcggatcaccgtcaatgcttccgttattgccgtgcatctcaatcagcacattccgcactttccaatcctggctcatccgcaccatcgcttcataaacggagctgtcaccgtgcggatgataattaccgataacgtttccgaccgtttttgccgctttacggaaatttttatcgaatgtatttccgtctgcgtgcatggcgtataaaattctccgctgcaccggctttaaaccgtcacgagcgtcgggcagcgccctgtcttgaataatgtatttactgtagcgtccgaaacggtcgccgattacttcttctaacggtaaatcatgaaataattctggctgtgccactattaaacctcctcagcgaccgacaagttttcattttccaaaatattgctttcctcatctaatccgaaggcaacattcttttcaatccattttcttctcggttctactttgtctcccattaatgtcgttacacggcgctctacccgtgccgcatcgtcgatcttgactctgacgagcgttcgcgattcgggattcatcgtcgtttcccagagctggtctgcgttcatttctcccagacctttatagcgctggatggtatatcctttgccgactttctttaaaacgccgtccatttcttcgtcggaccaagcatattcaataatctctttcttgccgcttcctttgctcactttgtaaagaggcggaagggcgatgaaaacttttccgtgctcgattaaaggtttcatatagcggtagaaaaacgttaacagcaagacttgaatgtgcgcgccgtcggtatccgcgtccgtcatgatgatgatcttgtcatagttgatgtcctctatatcaaaatctgcgccgacaccgccgccgatcgcatgaataatcgtattgatttcttcatttttgaagatgtctgcaagctttgctttctctgtgttgatgacctttccgcgaaggggcagcacggcttggaatttccggtctcttccctgttttgcagagcctccagcagagtctccctccaccagatacaattcattcttcgccggatttctggaaccggccggtgtgagttttccgctcagcgtcgcttctgattttttgcgctttttgccgcttctcgcttcttctctcgctttacgggccgcttcacgggcctggcttgctttaatcgcttttttgacaagcagggttgccgtatcgcggttttcttccaagaaataagcaagattctcagaaatgacggcatccgcggcggatctcgcctcacttgtgccgagcttccctttcgtctggccttcaaattgcagcagttcctccgggatacggacggaaatgattgcggacaaaccttccctgatatcggcgccttcaaggttcttgtctttctcttttaaaagggcgacctttcgcgcatactcgttaaacgctcttgtcattgccgttttggctcctgattcgtgggtgccgccgtcctttgttctgacgttattaacgaatgacagcatattttctgaatacccgtcattaaactgaaacgcgaaatcgacttcaatgtcatgatgctcgccttcaaaggacaccacttcgcataaagcgtctttttcctcgtttaaataagcgacaaatgcttcaattccgttctcataataaaatacttcttttacgcctttccgttcatcaattaattctattttcaaaccttttaacaagaaagccgattcgcgcagacgttctgacagcgtgtcaaaattataaaccgttgagctgaacattgacggatcaggtttaaaatgggtaagcgttcccgtttttttggtcgttccgattttttcaagtgaagtcacgggcttgccgccgttttcaaaccgctgtttatagacatatccgtcacgctcaatagtaactgtcagccactccgataatgcgtttacgacagatgcgccgacaccatgcagaccgccgcttgttttatagccgccctgtccgaatttccccccggcatgcagcacggtgaaaataacttccggcgtcggctttccgagcttatgcatcccggtcggcattccgcgtcctctatcctgaacggagatgctgttgtccttatgtatcgttacgataatatgatctccgtagccggcaagaacttcatcgacggaattgtcgacgatctcatataccagatggtgcaggccgcgtgcgtccgtcgaaccgatgtacattcccggtcgttttctgacggcttccaggccttcaagcacctgtatggcatcttcgttgtaatcaaattgctgttttctagccaaacgtacaaacccctttcaaaaaacctgctcttaatcattctcttttttaaatgttttcatgtctttgtttttcagtatgcgcaagcttcggtccaattctcctcggactcacaattataaccaatatgcttgatttcgcaacatatttaagcgaatggctcgttttttaggccgcaagacatacattcgaacggcttttcatctttttggtgcccttttcggcagataagaacatgagttcgctttctattatatagctttatgccggccatcgcaaacagactgcaaacccctgtataaaggggtttctaaaaaagctgttcatgctttattgtatctgtttcatcatcatacgcaaagagtattctttcaataaaaaagcaaaaacccctgatttgccaaggatttttgccttttttgttcctattttataacagcgcgggcgacttttatacataaatccattacagccgtccgtcctttgtctgtaatcatgcgatacgcttcttcatttgcaaggccctgctgcgcccaaaaaacgggagcgtccgtctgtaaaaattcttcagcaacgccgggaagctgctcagagcgtctgaacacattcacgatatcaatcggtccctccacgtcttttaatgaagcaacggctttaacgccaagcgcctcatcaatcgttgggttgacgggaataatttcatacccttcatcctgcatcgctttggaaaccatgtaagaagtccggtcgggacgatctgacagcccgacgaccgcgatccgtttgctccggtccagaatttctttaatctctgattttgaaggattttgcatctttaccatctccttttgatatattgtacatgaccgcttcgccggaatcaaaaaaagcgatttgtcagcttaattctcaaaaaacttgtcatcagacggtaacaactcgtgttaaaatagagtgaagggacattgaaaaggagaaatgtagatgttgattgctttattgattattttggcctatgcaataggcagcatcccgtcaggtttagtcgtaggcaaacttgcgaaagggatcgatattagagaacacggaagcggcaatttgggcgctacaaatgcttttcgcacgcttggcgttaaagcgggatctgtcgtcgtcgcagccgatattttaaaaggcaccctggccgcggcgctcccatatttactgcacgtccccattcatcctcttctcgcaggggtggcagcagtgatcggccatgtattccccgtgttcgcaaagtttaagggaggcaaagccgtagccacatcagggggcgtcctgctgttttatgctccgctgttattcgttacgatggttgcagtatttttcgtatttttattccttacgaaatttgtttctctgtcttcaatgttaacagggatttatacgattatttactgtctgtttgtaaaagacccttatttattaatcgtagtgacgctcttgaccgcgtttgttatctacagacacagggcaaacatcaaacggattataaacaaaacagaaccgaagatcaaatggttttgatgaaacttcaattttgacatcaaaatgccatatgcgtttataatagagataatttctttatatgagaaacaaaaagggagtgttccggatgaacatgaaagtaacgaaaggcgcgctggattggtacaaagaagagctcgatctggaaacaggcgaccatgtccgtttctttgtccgttacgggggatgcagcaacgttcagaaaggcttttctctcggcattttaaaagacctgccgatgaacatcggcaccagcacggaagttgaaggcattaccttttttattgaagaaagcgacttatggtactttgataatcacgatttgtcagtcacatattcagatcaggcagaagagccggtatttgattacgtgtaaaaaaaagaacgcagcggatgcgttcttttttttacagcctgaacctttttaggtgatcagtcagacgttctttttctaatatgcttctttgcgtttctccgagcaggtcaaagtggggaaattcatttttatggtgaatccactccggcttcagcccgtactccgctccccatctgatcagtttattgagatcgcttgaaccggccttcgtcacggtcttagcctccggaaagcggtcgtccagccagtaatgcgttaaaaaagcgattttcccttccgatacatcctgcttccatctttccagttccttacgcgtaattccaaatgccataagtgcagccgctccttatttttttgccttttcgtaagcggcatgccaatcaggaaaagccttgcgaaactgaatcggtttgaagctctctttatcaacgcatatatgagaggatgtcgctttgatggcaagttcttgatccggattatagatgtggtagccgtaaacggttttaaatccgttatattcttcaatccaagtatgtacgacagccgtttcaccgtagcggagcggctttttataagaaatgctgatatccaatacaggggacagcactcctctatcttccatatccttgtaaaggaatccgagttccttaatcagcgccgttctgccgacctccatccagactaagtaattggcatgatagacgatgcccatttgatctgtttccgcataacgcacttctatttctttttttgacacatgcaacgttctctgctccctttttatcagattagccccattttatcacaacgagccggaaagagaaaaaaaccaggtttccctggtttttattatgattgatagccgttttctcttgcagccgattcatcctgaatttcactgcggaacgattcaatgctttcattgcgtctggcattcttttcttgaatgcgctgtttttcctcatctgtcgcaaattccattgattctttcgcttcttctatattttcaattgtattctgcaccatatcctgcagcttttcaacgttatcggaacggtcatccggattcggtttttgatcattgtttgtcataatgtctgctctcctttgatgatgttattcgcctttcgtctgcatgacaatcggatgtccgtttgacttgtcatgaaacttttcccctttgttgcgtttatatttaacgggttttgtccctaagtggctcggagcgtattgcggctggccgtctttcttgtttatgcccatgttcatccctccttaagagtatattttgcaaaaggaggtgcaaacatgactgcaaattaaaggttatttttgtttgaaccgctgctccagcttttcttcaagctgattcaaatattccgtattggtcatcagctcacgtttattttccataaccaattcatgaaaagaacgttttcgcatttttttcaatcttctcacctccgtgttttcattcattttttccaatttttcaaaacctaagcccttcacaataaaaaaactgaacctctatttgagatccagtttttctttcatttctttttttgtcatcgtgcctacgcgaatgtgctgaatggttcctttttcgtctaatatgtatgttgtcggataagaaagcacgttgaaatccccgttaattccgcttttgtcaatcagaataggaaaggtcagctgataatgatcagcaaatgatttcacagcctgtatatttttttcagaagacgtaaaattaacggctgctaccgcaatatcaggatattctttctgcagctcctgcatatccggcatttccattcggcacggcttgcaccacgtcgcccagaaattgaggagcactttttttcctttataatcagatagggagatactttttcctgacaatgtatcaagtgtaaagtcaggggctttcatcccttcttctgtcccttctttcggacttttttgcacggaataaatgttccagcccgcatatactaacaacccgataagtaacattccgcccagccatttcgcaagcatcttaagcctcccgcataaaaagagagaaagcagactgctttctctcttttgttcattctgctactgtttcattttatcgcgaagcaccatttgtaaaatgccgccgtggcgatagtaatcaatttccacttcactgtcaaaacggacaacgacttcaaacgtttttaccgtaccgtcttcactgattgctctgacagtcagcaagtcgcgcggacgtacagattcatcaacatccacctcgatgacttccttaccggttaagccgagtgtatccgcgttttcgccctgtttgaactggagcggcagcacacccatgaagacgaggttgcttctgtgaattctttcaaagctttcggcaatgactgttctgatgccgagcaggtttgttccttttgcagcccagtcacgtgaagagcccattccgtaatcttttccggccaggacgacaagacccgttttatcttctttataccgcatgcaggcatcataaatagatgtcacttccccggtaggccaatgtgttgtgtagccgccttctgtacccggtgcgatttggtttttaatgcggatattggcgaatgttcctctcatcatgacttcatggtttccgcggcgtgagccgtaagagttaaagtcacgaggagaaacgcctttttcctgcaggtatttgcccgccggtgtgtcttttccgatcgctccggccggagaaatatggtcagtcgtcacggaatcgccgaatttgccgacaacgcgaagtcctcttaaaggctcaacttttcccggctctacagacatttcctcaaagaatggcgggttttgaatgtaagtggaatcctggtcccacttatacagcgcttcatccgtcgtttcgatttcgttccagcgctggttgtcgtcaaataccgtttcatactctttgcggaataattccggcgtaacagtctgtttgacgagagaattgatttcatccatggacggccagatgtcatcgaaataaacattttgtccgtcatttccgacgccgatcggatccgttttcaggttgatgtttacagttcccgccaatgcgtatgcgacaacaagcggcggtgacgcaaggtagtttcctttgacaagcgggtggatccggccttcaaagtttctgttacccgacaggacagaagtgatcaggaggtcatttttagcaaccgcttcttcaatctctggagaaagcgggccggagttcccgatacatgtcgtacagccataccccacaaggttaaagccgagctccttcatgtaaggaagcagacctgagttgactaagtatccagtaacaaccttagaccccggtgcaagtgaagtcttcacataattcggcactttcaagcctaattctaccgcttttttggctaccaatccggcaccgattaatacataagggtttgatgtattcgtacagcttgtaatagcggcgattgcaatcgcccctgttttcataaccgcatcttcaccgctgttaagtttaaatgaaatttctttgttctcttcagcagcatccgctccgaatccttggttgccggccgggctgacaagatgttttttaaacgtttcctgcataacggaaagcgggattaaatcctgcggacgtttcgggcctgaaaggttcgcttcgatttttgacagatcaatttccacaacgtctgtaaaaatcggctcttccgcgtcaggcgtatagaataaaccgttgctgcggcagtatgcttccacaatatcgatctgctcttcttcacggccggtcagacgcaggtaagaaagtgcttcctcgtcaaccgggaagaatccgcaagtcgctccgtattccggcgccatattggcaatagtcgcccgatccgcaagcggaagctcagcaacaccaggaccgaagaattcaacaaatttattgactacgcctttttcacgcagcacttgagtgactttcagcgccaagtcagtcgccgtcgttccgttaggcaattttccgacaagtttcgcgccgatgacctcaggaacagggaaatatgaaggctggccgagcattcccgcttccgcttcaataccgccgacaccccagccgaggacgccgattccgttaatcattgttgtatgggaatcagttcccaccaaagtatcaggataggtcacaagttctccgtcttcctctttcgtatggacaacgcttgccaaaaactcaaggtttacctggtgaacgatacctgttgcaggcggaacggcctgataattgttaaacgctttctttgcccagcttaaaaatttataacgttctgcatttctttcgaattctaagtccatattaatggctaacgcatcttccgtaccggctttgtcaacttgtacggagtggtcaatgaccaggtcaaccggaatttcaggattgattttatcagggtctccgccgacagaggccatggcttttcttaaagatgccaggtcaactacggccggaacgccggtaaagtcctgcagaataacccgtgacggtttaaacggcacatcgatatcttttaattcagcagtaccccatcttgctaaattttcaacatgctcttttgtaatgacgcgtccgtctacctgacgcaaaacggattccaaaagaaccttaatagaataaggaagttttgaaacattgccgacccctgcgtcttccaatgcttttaatgaatagtagttgtatgttttcccatttgaagaaaatgtttttcttgcttggaaaacgtcttgtgttgcgactttttgctgatttgtcattctccaaaatcccccttcaatgatcaagatcgttctttagatgaatgttcacattccatcacaattttctcacaatttcatcttagtataaaatcatacataagtaaatatcaatgtttttattaaatacaataagatcgtcttatcagcatattttcggtaaattttgtccgattttccgcctcatacaacgggctgtaaagagccatattaatgttgaggtgatgatcatggtaaaacggaaagccaatcatgtaattaacggcatgaatgatgcgaaaagccaaggcaaaggcgcgggttatatagaaaatgaccagctcgtcctgacggaagaagaacggcagaacaataaaaaaagaaaaacaaaccaatagccggaacaccttaaaaaggaggctttaacatgacaaataaaaatacgagtaaagatatgcataaaaatgctccgaagggccataaccccggccagccggaaccgctgagcggaagcaaaaaagtgaaaaaccgcaaccatacaagacaaaaacataatacaagccacgatatgtaaaacagaccccggtgtctgtttttttgtgccattcacccatttaaagcttctgcatacgttatagcaaggctttttaatatggaggaatgcttccatgaatcactcaaaaaacgctgaagaatttgatgatacggaagaatggctgcggcagttttacgaggacccgtatgcttggtatgacgagacgctgccgatcgatctatatgaaacaagccgtcagtatatcattgaagccgacctgacggccctgaagcaggtgcaggcgatcaccgtcactctttcgggaaatgagtttatgctctctgttaaaacgcttgaacggacattaaacaaacaaatggtgcttcctttttatctgaatgacaaacatattttcactgatttcaccaaccatattctgaccgtctccatgaacaaggagcctaatgagactcctgcctcattttcctttcaatttcctctataacataaaaaagccgctttcatccctcaatggaagcggcttttttgtccggtcatatcagtcatataccctcaaagtgaatctcccatggccaaatagcagaatcactatacgatagaatatgttctagcaaccgaattgactggacatctatcattttttctattctttttttcatgtgttcttctattctgtcttcgtttacaatatggttaaagtaaggaggagatagaacaatgctagaaggctggtttatgtggtttattttattttgggtcatcgtgatgatcggattgctgtctatcggcggattttttatgttccgaaaatttttaaaacgcttaccgaaagaagacggccggtcagaactggattggcaggactattatattgaaaaaagcaggcacttatggaatgcgggtgacaaggcgtttttggatgaattggtcgctcccgtgccggagctctttcgggatgtagccaaagcgaaaatcgccggaaaaatcggtgaactttccttagcggaggaagctgaacaaataaatcgtgatttaatcatcaggggttacatactggccactcctaagcgtgatcatcaatttttaaaaaagcatctccgcgaaaaacagattgatcttactccttatcaggccctgctcaaataaaaaacctttccggcggacggaaaggttttaattcatctgaatatcagcggtcttcagttcattcgaaagtttgcggtaagacataaacatcgcgatgcgccacggaacaatcattccgaaagccagaatccaaaacattccgcttaaagctccgtaatcaatcgtcgtgctcaaaatggatttcatagcgattctgataaccagcaaaccaatcaggataaacacaaacgcttttgaccgttttaaatagatttcattatttttaatctcaaatttagatgttttaatcagaaaaatagagaagatcacgcccagcgtaatggcctccaaaaattcttcgcccgtcactctgaaaatcggaaaaaggaacataagcgctcccgtactcatgaaaatcggcgggagaattatttttttaggtgaagcgggcttgtcggaggctttaatcctgacgatcatcacggaaatggccatggccgctgcaataacggatgaaattataatcatcatctttatcattcctttgcttgcacggagtttgatactatatactatactccaaaaacataaaaaaaaccaatttgaaaagagaacacgtttacgttcccgttacccggcctacggcctccagcactttagatgcttcaaacggtttaacgataaagtctttagcgcctaattcaatcgcttccagaacgatccgctgctgccgcatggcggtgcacatgatgatccgggctttcgggtcaaaagctaaaatatcctgcagcgcctgtataccgtttttgaccggcatggtaatatccattgtcaccaggtcgggacggattttttgatatactgccagggcttcctcgccgtcagccgcttctccggccactgtgtaattcgccgtttccagaatctctctgattttcgccctcatgaacttggcgtcatctacaactaaaactcgtgtcatattcccctccacatatttaacattaactagtcttattgtaccaaaaacgaaagggtatataatagttcaaaagttattaatccgttacagacccgtaaatcctccgaaaagatttgacagaacgatcagaatgtagctcatccagttaaaaaacagcataactccgatcagaatcataagaatgccgccgattttcatgataagcagctgatgcttgcgaatccaattcattctggtaataaaaaatgaaagaacaagaaaaggaatcgcaaaaccgagaacatataaaaacatatacggcactgctgaagaaggatttgtatttgccagcgaaaacacggctcctaaaataggcccgctgcacggcgaccagccggctgcaaacgcaagaccgatcagaaccgaaccgataaacccctccggacggcgcttaaagtgaatgcgccgctctttcatcatgaatttcggctgaaacacaccggcagtaatcagcccgaaaagaatcagcatgatagcgccaaactggcggatcgcttcatgatattgggtaaaaaaactgccgataaacgaagttccatatcccaatgcgataaaaatcacggagaagccaagcaaaaaacaaagtgtatgcacgaggccacgcttttgcagcatcaccttttctgttttcacctcgtccatactgacaccagttatgtaagataaaaaggcggggtacaacggcagacagcatggagaaatgaaagacagaaatccggccccaaacgtcagaaagtaattaaaactcacgatgacacactcccttcgagttatgacaaaatcatttcatttttttaacactttcccgagaaggattactttttatagaaaaagcttatataatttaatttgacatcgagatattatactccttcttatttgaaaaacagtataaatgtggatataataatagcgactcaggtgaaagatttatgtatgaaaggatatatccctgtgattagagagcatctattaaatgaaattgaaaaaaaacgggcagagctgcttaaaatcgtcatgacaaacggaatgacatcaaacattacgatagaactcagccaggagcttgaccaccttctcatacaataccaaaaagaactgcacaccggcagttggggtgaaacatgacgcaaaaataaaaaaccctctccgggttttttatttttataaccatgtatctctatatcataatctgtacgtattatttcgcttgattattcatggctttcatcatttgattaattttcttttgagaaggtttcattcccatttgcatcatcatcatgcgtaacatttgttcattaataggcggattctttttcaaatagctcatcatatatttacgagcaataaaaaacccgagtgcaaca
